(19) United States
(12) Patent Application Publication
(10) Pub. No.: US 2024/0209408 A1
(43) Pub. Date: Jun. 27, 2024

(54) ENGINEERED 3-O-KINASE VARIANTS AND METHODS OF USE

(71) Applicant: Codexis, Inc., Redwood City, CA (US)

(72) Inventors: David Entwistle, San Carlos, CA (US); Stephanie Marie Forgel, Redwood City, CA (US); Anders Matthew Knight, Mountain View, CA (US); Mikayla Krawczyk, Redwood City, CA (US); Philip Provencher, San Francisco, CA (US); Amani Shoubber, Redwood City, CA (US); Jonathan Vroom, South San Francisco, CA (US); David Watts, San Mateo, CA (US); Leland Wong, San Bruno, CA (US)

(73) Assignee: Codexis, Inc., Redwood City, CA (US)

(21) Appl. No.: 18/485,925

(22) Filed: Oct. 12, 2023

Related U.S. Application Data
(60) Provisional application No. 63/387,908, filed on Dec. 16, 2022.

(51) Int. Cl. C12P 19/38; C12N 9/02; C12N 9/12

(52) U.S. Cl. CPC C12P 19/38; C12N 9/0008; C12N 9/1205; C12Y 102/03003; C12Y 207/01

(57) ABSTRACT

The present invention provides engineered 3′O-kinase polypeptides useful for construction of materials used in template-independent polynucleotide synthesis, as well as compositions and methods of utilizing these engineered polypeptides. The present disclosure also describes one-pot methods for conversion of a natural or modified nucleoside to a nucleoside tetraphosphate or NQP.

### CROSS REFERENCE TO RELATED APPLICATIONS

[0001] This application claims the priority benefit of U.S. Provisional Patent Application No. 63/387,908, filed Dec. 16, 2023, the entirety of which is incorporated herein by reference.

### TECHNICAL FIELD

[0002] The present invention provides engineered 3′O-kinase polypeptides useful for construction of materials used in template-independent polynucleotide synthesis, as well as compositions and methods of utilizing these engineered polypeptides. The present disclosure also describes one-pot methods for conversion of a natural or modified nucleoside to a nucleoside tetraphosphate or NQP.

### REFERENCE TO SEQUENCE LISTING, TABLE OR COMPUTER PROGRAM

[0003] The official copy of the Sequence Listing is submitted concurrently with the specification as an XML file, with a file name of “CX10-241WO2_ST26.xml”, a creation date of Oct. 11, 2023, and a size of 3,729,984 bytes. The Sequence Listing filed is part of the specification and is incorporated in its entirety by reference herein.

### BACKGROUND

[0004] Synthetic biology is becoming established in a diverse range of high value, high growth markets. From food and agriculture to therapeutics, diagnostics, and vaccines; tools such as gene editing, DNA sequencing and gene synthesis are being used to build value-added products with advanced functionality (e.g., cell bioreactors, etc.) and desired end products (e.g., drugs, chemicals, etc.). The barrier to widespread implementation of these technologies is the ability to efficiently synthesize RNA, DNA, and other polynucleotides.

[0005] In particular, silencing RNA (siRNA) therapeutics are, amongst other polynucleotides, a promising class of drugs that have the potential to treat numerous difficult to treat conditions in a highly targeted manner by binding to known mRNA targets (Hu et al. (2020). Sig Transduct Target Ther 5, 101; Zhang et al. (2021). Bioch. Pharmac., 189, 114432.) As these therapies become more common and are targeted at larger patient populations, the ability to produce large amounts of the oligonucleotide active pharmaceutical ingredient (API) becomes critical.

[0006] Phosphoramidite chemistry has been developed extensively over the years to synthesize small amounts of DNA and RNA, but suffers from several cost, processing and sustainability issues that are potentially limiting as API demand grows to triple-quadruple digit kilograms per year (Andrews et al. (2021). J. Org. Chem. 86, 49-61). Additionally, RNA synthesis using phosphoramidite synthesis chemistry is limited to producing short oligonucleotides of approximately 200 basepairs (Beaucage & Caruthers. (1981). Tetrahedron Lett. 22 (20): 1859.)

[0007] New oligonucleotide synthesis techniques are being developed to replace to phosphoramidite chemistry to meet the growing demand for large quantities of DNA and RNA necessary for modern medical and industrial applications. The most promising of these is template independent oligonucleotide synthesis using various polymerases, including terminal nucleotide transferases (TdTs) and polyX polymerases. These methods often rely on modified nucleotide triphosphates (NTPs) that incorporate blocking groups or other structural or chemical elements that allow the controlled addition of a defined sequence of NTPs. These modified NTPs include NTPs with blocking groups on the 3′ or 2′ positions of the sugar, as well as NTPs with modified bases or thiol derivates for the formation of more stable oligonucleotide phosphorthioate backbone bonds.

[0008] As these methods mature, a limiting factor is the commercial availability and cost of natural and modified NTPs for synthesis reactions. In particular, NTPs with a phosphate at the 3′ position of the sugar (nucleoside tetraphosphates, pppNps or NQPs), with or without additional modifications to the nucleobase, sugar, and/or phosphate chain, are useful for emerging template independent synthesis applications. However, these NQPs are not widely commercially available and are cost prohibitive at an industrial scale. In conclusion, new methods to synthesize natural and modified NTPs and NQPs are necessary to enable production of oligonucleotides on the scale required for modern synthetic biology applications.

### SUMMARY

[0009] The present disclosure provides engineered 3′O-kinase polypeptides useful for the synthesis of nucleoside tetraphosphates (pppNps or NQPs), as well as compositions and methods of utilizing these engineered polypeptides. The 3′O-kinases of the present disclosure are variants of the wild-type dephospho-CoA kinase (CoaE) gene from Geobacillus stearothermophilus (SEQ ID NO: 10). These engineered 3′O-kinases are capable of adding a phosphate group to the 3′ position of the sugar of a natural or modified NTP to produce an NQP. The present disclosure provides various methods of synthesizing natural and modified NQPs.

[0010] In some embodiments, the present disclosure provides an engineered 3′O-kinase polypeptide comprising an amino acid sequence having at least 80%, 85%, 90%, 91%, 92%, 93%, 94%, 95%, 96%, 97%, 98%, 99%, or more sequence identity to a reference sequence selected from SEQ ID NO: 10, 142, 372, 450, 496, 1042, 1180, and 1412, comprising at least one substitution or one substitution set at one or more positions, wherein the positions are numbered with reference to SEQ ID NO: 10 and wherein the engineered 3′O-kinase polypeptide has increased activity on natural substrates, increased activity on non-natural substrates, increased selectivity, increased substrate promiscuity, decreased product inhibition and/or decreased byproduct formation, as compared to a wild-type or reference 3′O-kinase known to those of skill in the art. These engineered 3′O-kinase polypeptides with one or more amino acid substitutions or substitution sets are described, below, in the detailed description of the invention.

[0011] In some additional embodiments, the engineered polypeptide comprises an amino acid sequence with at least 60%, 80%, 85%, 90%, 91%, 92%, 93%, 94%, 95%, 96%, 97%, 98%, 99%, or more sequence identity to any even-numbered sequence selected from SEQ ID NO: 56-366, or 372-2122.

[0012] The present disclosure also provides an engineered polynucleotide encoding at least one engineered polypeptide described in the above paragraphs. In some embodiments, the engineered polynucleotide comprises the odd-numbered sequences selected from SEQ ID NO: 55-365, or 371-2121.

[0013] The present disclosure further provides vectors comprising at least one engineered polynucleotide described above. In some embodiments, the vectors further comprise at least one control sequence.

[0014] The present disclosure also provides host cells comprising the vectors provided herein. In some embodiments, the host cell produces at least one engineered polypeptide provided herein.

[0015] The present disclosure further provides methods of producing an engineered 3′O-kinase polypeptide, comprising the steps of culturing the host cell provided herein under conditions such that the engineered polynucleotide is expressed and the engineered polypeptide is produced. In some embodiments, the methods further comprise the step of recovering the engineered polypeptide.

[0016] The present disclosure further provides a one-pot method for conversion of nucleosides to NQPs comprising a 5′O-kinase enzyme, a nucleoside diphosphate kinase enzyme, an acetate kinase enzyme, and a 3′O-kinase enzyme, under suitable reaction conditions for conversion of a natural or modified nucleoside to a natural or modified NQP, optionally including an acetate kinase enzyme and/or a pyruvate oxidase enzyme and/or other suitable recycling enzymes. In some embodiments, the one-pot method is a telescoping method, comprising two steps.

### BRIEF DESCRIPTION OF THE DRAWINGS

[0017] FIG. 1 depicts Scheme 3—a one-pot method for conversion of nucleosides to NQPs.

[0018] FIG. 2 depicts Scheme 4—the first step conversion of a nucleoside to an NTP in a one-pot method for conversion of nucleosides to NQPs that occurs in two steps.

### DESCRIPTION OF THE INVENTION

[0019] Unless defined otherwise, all technical and scientific terms used herein generally have the same meaning as commonly understood by one of ordinary skill in the art to which this invention pertains. Generally, the nomenclature used herein and the laboratory procedures of cell culture, molecular genetics, microbiology, organic chemistry, analytical chemistry and nucleic acid chemistry described below are those well-known and commonly employed in the art. Such techniques are well-known and described in numerous texts and reference works well known to those of skill in the art. Standard techniques, or modifications thereof, are used for chemical syntheses and chemical analyses. All patents, patent applications, articles and publications mentioned herein, both supra and infra, are hereby expressly incorporated herein by reference.

[0020] Although any suitable methods and materials similar or equivalent to those described herein find use in the practice of the present invention, some methods and materials are described herein. It is to be understood that this invention is not limited to the particular methodology, protocols, and reagents described, as these may vary, depending upon the context they are used by those of skill in the art. Accordingly, the terms defined immediately below are more fully described by reference to the invention as a whole.

[0021] It is to be understood that both the foregoing general description and the following detailed description are exemplary and explanatory only and are not restrictive of the present invention. The section headings used herein are for organizational purposes only and not to be construed as limiting the subject matter described. Numeric ranges are inclusive of the numbers defining the range. Thus, every numerical range disclosed herein is intended to encompass every narrower numerical range that falls within such broader numerical range, as if such narrower numerical ranges were all expressly written herein. It is also intended that every maximum (or minimum) numerical limitation disclosed herein includes every lower (or higher) numerical limitation, as if such lower (or higher) numerical limitations were expressly written herein.

[0022] As used in this specification and the appended claims, the singular forms “a”, “an” and “the” include plural referents unless the context clearly indicates otherwise. Thus, for example, reference to “a polypeptide” includes more than one polypeptide. Similarly, “comprise,” “comprises,” “comprising” “include,” “includes,” and “including” are interchangeable and not intended to be limiting.

[0023] It is to be understood that where descriptions of various embodiments use the term “comprising,” those skilled in the art would understand that in some specific instances, an embodiment can be alternatively described using language “consisting essentially of” or “consisting of.” It is to be further understood that where descriptions of various embodiments use the term “optional” or “optionally” the subsequently described event or circumstance may or may not occur, and that the description includes instances where the event or circumstance occurs and instances in which it does not. It is to be understood that both the foregoing general description, and the following detailed description are exemplary and explanatory only and are not restrictive of this disclosure. The section headings used herein are for organizational purposes only and not to be construed as limiting the subject matter described.

### Abbreviations

[0024] The abbreviations used for the genetically encoded amino acids are conventional and are as follows:

| Amino Acid | Three-Letter | One-Letter Abbreviation |
|---|---|---|
| Alanine | Ala | A |
| Arginine | Arg | R |
| Asparagine | Asn | N |
| Aspartate | Asp | D |
| Cysteine | Cys | C |
| Glutamate | Glu | E |
| Glutamine | Gln | Q |
| Glycine | Gly | G |
| Histidine | HIS | H |
| Isoleucine | Ile | I |
| Leucine | Leu | L |
| Lysine | Lys | K |
| Methionine | Met | M |
| Phenylalanine | Phe | F |
| Proline | Pro | P |
| Serine | Ser | S |
| Threonine | Thr | T |
| Tryptophan | Trp | W |
| Tyrosine | Tyr | Y |
| Valine | Val | V |

[0025] When the three-letter abbreviations are used, unless specifically preceded by an “L” or a “D” or clear from the context in which the abbreviation is used, the amino acid may be in either the L- or D-configuration about α-carbon (C_{α}). For example, whereas “Ala” designates alanine without specifying the configuration about the α-carbon, “D-Ala” and “L-Ala” designate D-alanine and L-alanine, respectively.

[0026] When the one-letter abbreviations are used, upper case letters designate amino acids in the L-configuration about the α-carbon and lower case letters designate amino acids in the D-configuration about the α-carbon. For example, “A” designates L-alanine and “a” designates D-alanine. When polypeptide sequences are presented as a string of one-letter or three-letter abbreviations (or mixtures thereof), the sequences are presented in the amino (N) to carboxy (C) direction in accordance with common convention.

[0027] The abbreviations used for the genetically encoding nucleosides are conventional and are as follows: adenosine (A); guanosine (G); cytidine (C); thymidine (T); and uridine (U). These abbreviations are also used interchangeably for nucleosides and nucleotides (nucleosides with one or more phosphate groups). Unless specifically delineated, the abbreviated nucleosides or nucleotides may be either ribonucleosides (or ribonucleotides) or 2′-deoxyribonucleosides (or 2′-deoxyribonucleotides). The nucleosides or nucleotides may also be modified at the 3′ position. The nucleosides or nucleotides may be specified as being either ribonucleosides (or ribonucleotides) or 2′-deoxyribonucleosides (or 2′-deoxyribonucleotides) on an individual basis or on an aggregate basis. When nucleic acid sequences are presented as a string of one-letter abbreviations, the sequences are presented in the 5′ to 3′ direction in accordance with common convention, and the phosphates are not indicated.

### Definitions

[0028] In reference to the present invention, the technical and scientific terms used in the descriptions herein will have the meanings commonly understood by one of ordinary skill in the art, unless specifically defined otherwise. Accordingly, the following terms are intended to have the following meanings.

[0029] “EC” number refers to the Enzyme Nomenclature of the Nomenclature Committee of the International Union of Biochemistry and Molecular Biology (NC-IUBMB). The IUBMB biochemical classification is a numerical classification system for enzymes based on the chemical reactions they catalyze.

[0030] “ATCC” refers to the American Type Culture Collection whose biorepository collection includes genes and strains.

[0031] “NCBI” refers to National Center for Biological Information and the sequence databases provided therein.

[0032] “Protein,” “polypeptide,” and “peptide” are used interchangeably herein to denote a polymer of at least two amino acids covalently linked by an amide bond, regardless of length or post-translational modification (e.g., glycosylation, phosphorylation, lipidation, myristilation, ubiquitination, etc.). Included within this definition are D- and L-amino acids, and mixtures of D- and L-amino acids, as well as polymers comprising D- and L-amino acids, and mixtures of D- and L-amino acids.

[0033] “Amino acids” are referred to herein by either their commonly known three-letter symbols or by the one-letter symbols recommended by IUPAC-IUB Biochemical Nomenclature Commission. Nucleotides, likewise, may be referred to by their commonly accepted single letter codes.

[0034] As used herein, “polynucleotide,” “oligonucleotide,” and “nucleic acid” are used interchangeably herein and refer to two or more nucleosides or nucleotides that are covalently linked together. The polynucleotide may be wholly comprised of ribonucleotides (i.e., RNA), wholly comprised of 2′deoxyribonucleotides (i.e., DNA), wholly comprised of other synthetic nucleotides or comprised of mixtures of synthetic, ribo- and/or 2′ deoxyribonucleotides. The polynucleotides may also include modified nucleotides with substitutions, including 2′ substitutions (e.g., 2′-flouro, 2′-O-methyl, 2′-O-methoxyethyl, locked or constrained ethyl modifications, and others known to those skilled in the art). Nucleosides will be linked together via standard phosphodiester linkages or via one or more non-standard linkages, including but not limited to phosphothiolated linkages. The polynucleotide may be single-stranded or double-stranded, or may include both single-stranded regions and double-stranded regions. Moreover, while a polynucleotide will typically be composed of the naturally occurring encoding nucleobases (i.e., adenine, guanine, uracil, thymine and cytosine), it may include one or more modified and/or synthetic nucleobases, such as, for example, inosine, xanthine, hypoxanthine, etc. In some embodiments, such modified or synthetic nucleobases are nucleobases encoding amino-acid sequences. Nucleobases that are modified or synthetic may comprise any known or hypothetical or future discovered modification or structure that would be recognized by one of skill in the art as a modified or synthetic nucleobase. Similarly, the terms “polynucleotide,” “oligonucleotide,” and “nucleic acid” are intended to comprise any modified or synthetic structure that is now known or discovered in the future that would be recognized by one of skill in the art as being or having the function of a “polynucleotide,” “oligonucleotide,” or “nucleic acid.” An example of a modified or synthetic structure having the function of a “polynucleotide,” “oligonucleotide,” or “nucleic acid” is PNA or peptide nucleic acid.

[0035] As used herein, “template-independent synthesis” refers to synthesis of an oligonucleotide or a polynucleotide without the use of template strand as a guide for synthesis of a complementary oligo or polynucleotide strand. Thus, template-independent synthesis refers to an iterative process, whereby, successive NTPs are added to a growing oligo or nucleotide chain or acceptor substrate. Template-independent synthesis may be in a sequence defined manner or may be random, as is the case with the wild-type TdT in creating antigen receptor diversity. Processes for template-independent synthesis are further described herein.

[0036] “Coding sequence” refers to that portion of a nucleic acid (e.g., a gene) that encodes an amino acid sequence of a protein.

[0037] “Naturally-occurring” or “wild-type” refers to the form found in nature. For example, a naturally occurring or wild-type polypeptide or polynucleotide sequence is a sequence present in an organism that can be isolated from a source in nature and which has not been intentionally modified by human manipulation.

[0038] As used herein, “recombinant,” “engineered,” and “non-naturally occurring” when used with reference to a cell, nucleic acid, or polypeptide, refer to a material, or a material corresponding to the natural or native form of the material, that has been modified in a manner that would not otherwise exist in nature. In some embodiments, the cell, nucleic acid or polypeptide is identical a naturally occurring cell, nucleic acid or polypeptide, but is produced or derived from synthetic materials and/or by manipulation using recombinant techniques. Non-limiting examples include, among others, recombinant cells expressing genes that are not found within the native (non-recombinant) form of the cell or express native genes that are otherwise expressed at a different level.

[0039] “Percentage of sequence identity” and “percentage homology” are used interchangeably herein to refer to comparisons among polynucleotides or polypeptides, and are determined by comparing two optimally aligned sequences over a comparison window, wherein the portion of the polynucleotide or polypeptide sequence in the comparison window may comprise additions or deletions (i.e., gaps) as compared to the reference sequence for optimal alignment of the two sequences. The percentage may be calculated by determining the number of positions at which the identical nucleic acid base or amino acid residue occurs in both sequences to yield the number of matched positions, dividing the number of matched positions by the total number of positions in the window of comparison and multiplying the result by 100 to yield the percentage of sequence identity. Alternatively, the percentage may be calculated by determining the number of positions at which either the identical nucleic acid base or amino acid residue occurs in both sequences or a nucleic acid base or amino acid residue is aligned with a gap to yield the number of matched positions, dividing the number of matched positions by the total number of positions in the window of comparison and multiplying the result by 100 to yield the percentage of sequence identity. Those of skill in the art appreciate that there are many established algorithms available to align two sequences. Optimal alignment of sequences for comparison can be conducted, e.g., by the local homology algorithm of Smith and Waterman (Smith and Waterman, Adv. Appl. Math., 2:482 [1981]), by the homology alignment algorithm of Needleman and Wunsch (Needleman and Wunsch, J. Mol. Biol., 48:443 [1970]), by the search for similarity method of Pearson and Lipman (Pearson and Lipman, Proc. Natl. Acad. Sci. USA 85:2444 [1988]), by computerized implementations of these algorithms (e.g., GAP, BESTFIT, FASTA, and TFASTA in the GCG Wisconsin Software Package), or by visual inspection, as known in the art. Examples of algorithms that are suitable for determining percent sequence identity and sequence similarity include, but are not limited to the BLAST and BLAST 2.0 algorithms, which are described by Altschul et al. (See, Altschul et al., J. Mol. Biol., 215: 403-410 [1990]; and Altschul et al., Nucl. Acids Res., 3389-3402 [1977], respectively). Software for performing BLAST analyses is publicly available through the National Center for Biotechnology Information website. This algorithm involves first identifying high scoring sequence pairs (HSPs) by identifying short words of length W in the query sequence, which either match or satisfy some positive-valued threshold score T when aligned with a word of the same length in a database sequence. T is referred to as, the neighborhood word score threshold (Altschul et al., supra). These initial neighborhood word hits act as seeds for initiating searches to find longer HSPs containing them. The word hits are then extended in both directions along each sequence for as far as the cumulative alignment score can be increased. Cumulative scores are calculated using, for nucleotide sequences, the parameters M (reward score for a pair of matching residues; always >0) and N (penalty score for mismatching residues; always <0). For amino acid sequences, a scoring matrix is used to calculate the cumulative score. Extension of the word hits in each direction are halted when: the cumulative alignment score falls off by the quantity X from its maximum achieved value; the cumulative score goes to zero or below, due to the accumulation of one or more negative-scoring residue alignments; or the end of either sequence is reached. The BLAST algorithm parameters W, T, and X determine the sensitivity and speed of the alignment. The BLASTN program (for nucleotide sequences) uses as defaults a wordlength (W) of 11, an expectation (E) of 10, M=5, N=−4, and a comparison of both strands. For amino acid sequences, the BLASTP program uses as defaults a wordlength (W) of 3, an expectation (E) of 10, and the BLOSUM62 scoring matrix (See, Henikoff and Henikoff, Proc. Natl. Acad. Sci. USA 89:10915 [1989]). Exemplary determination of sequence alignment and % sequence identity can employ the BESTFIT or GAP programs in the GCG Wisconsin Software package (Accelrys, Madison WI), using default parameters provided.

[0040] “Reference sequence” refers to a defined sequence used as a basis for a sequence comparison. A reference sequence may be a subset of a larger sequence, for example, a segment of a full-length gene or polypeptide sequence. Generally, a reference sequence is at least 20 nucleotide or amino acid residues in length, at least 25 residues in length, at least 50 residues in length, or the full length of the nucleic acid or polypeptide. Since two polynucleotides or polypeptides may each (1) comprise a sequence (i.e., a portion of the complete sequence) that is similar between the two sequences, and (2) may further comprise a sequence that is divergent between the two sequences, sequence comparisons between two (or more) polynucleotides or polypeptide are typically performed by comparing sequences of the two polynucleotides or polypeptides over a “comparison window” to identify and compare local regions of sequence similarity. In some embodiments, a “reference sequence” can be based on a primary amino acid sequence, where the reference sequence is a sequence that can have one or more changes in the primary sequence. For instance, a “reference sequence based on SEQ ID NO:4 having at the residue corresponding to X14 a valine” or X14V refers to a reference sequence in which the corresponding residue at X14 in SEQ ID NO:4, which is a tyrosine, has been changed to valine.

[0041] “Comparison window” refers to a conceptual segment of at least about 20 contiguous nucleotide positions or amino acids residues wherein a sequence may be compared to a reference sequence of at least 20 contiguous nucleotides or amino acids and wherein the portion of the sequence in the comparison window may comprise additions or deletions (i.e., gaps) of 20 percent or less as compared to the reference sequence (which does not comprise additions or deletions) for optimal alignment of the two sequences. The comparison window can be longer than 20 contiguous residues, and includes, optionally 30, 40, 50, 100, or longer windows.

[0042] As used herein, “substantial identity” refers to a polynucleotide or polypeptide sequence that has at least 80 percent sequence identity, at least 85 percent identity, at least between 89 to 95 percent sequence identity, or more usually, at least 99 percent sequence identity as compared to a reference sequence over a comparison window of at least 20 residue positions, frequently over a window of at least 30-50 residues, wherein the percentage of sequence identity is calculated by comparing the reference sequence to a sequence that includes deletions or additions which total 20 percent or less of the reference sequence over the window of comparison. In some specific embodiments applied to polypeptides, the term “substantial identity” means that two polypeptide sequences, when optimally aligned, such as by the programs GAP or BESTFIT using default gap weights, share at least 80 percent sequence identity, preferably at least 89 percent sequence identity, at least 95 percent sequence identity or more (e.g., 99 percent sequence identity). In some embodiments, residue positions that are not identical in sequences being compared differ by conservative amino acid substitutions.

[0043] “Corresponding to,” “reference to,” and “relative to” when used in the context of the numbering of a given amino acid or polynucleotide sequence refer to the numbering of the residues of a specified reference sequence when the given amino acid or polynucleotide sequence is compared to the reference sequence. In other words, the residue number or residue position of a given polymer is designated with respect to the reference sequence rather than by the actual numerical position of the residue within the given amino acid or polynucleotide sequence. For example, a given amino acid sequence, such as that of an engineered 3′O-kinase, can be aligned to a reference sequence by introducing gaps to optimize residue matches between the two sequences. In these cases, although the gaps are present, the numbering of the residue in the given amino acid or polynucleotide sequence is made with respect to the reference sequence to which it has been aligned.

[0044] “Amino acid difference” or “residue difference” refers to a change in the amino acid residue at a position of a polypeptide sequence relative to the amino acid residue at a corresponding position in a reference sequence. The positions of amino acid differences generally are referred to herein as “Xn,” where n refers to the corresponding position in the reference sequence upon which the residue difference is based. For example, a “residue difference at position X25 as compared to SEQ ID NO: 2” refers to a change of the amino acid residue at the polypeptide position corresponding to position 25 of SEQ ID NO:2. Thus, if the reference polypeptide of SEQ ID NO: 2 has a valine at position 25, then a “residue difference at position X25 as compared to SEQ ID NO:2” an amino acid substitution of any residue other than valine at the position of the polypeptide corresponding to position 25 of SEQ ID NO: 2. In most instances herein, the specific amino acid residue difference at a position is indicated as “XnY” where “Xn” specified the corresponding position as described above, and “Y” is the single letter identifier of the amino acid found in the engineered polypeptide (i.e., the different residue than in the reference polypeptide). In some embodiments, more than one amino acid can appear in a specified residue position (i.e., the alternative amino acids can be listed in the form XnY/Z, where Y and Z represent alternate amino acid residues). In some instances (e.g., in Tables 13.1, 13.2, 13.3, 13.4, and 13.5.) the present invention also provides specific amino acid differences denoted by the conventional notation “AnB”, where A is the single letter identifier of the residue in the reference sequence, “n” is the number of the residue position in the reference sequence, and B is the single letter identifier of the residue substitution in the sequence of the engineered polypeptide. Furthermore, in some instances, a polypeptide of the present invention can include one or more amino acid residue differences relative to a reference sequence, which is indicated by a list of the specified positions where changes are made relative to the reference sequence. In some additional embodiments, the present invention provides engineered polypeptide sequences comprising both conservative and non-conservative amino acid substitutions.

[0045] As used herein, “conservative amino acid substitution” refers to a substitution of a residue with a different residue having a similar side chain, and thus typically involves substitution of the amino acid in the polypeptide with amino acids within the same or similar defined class of amino acids. By way of example and not limitation, an amino acid with an aliphatic side chain is substituted with another aliphatic amino acid (e.g., alanine, valine, leucine, and isoleucine); an amino acid with an hydroxyl side chain is substituted with another amino acid with a hydroxyl side chain (e.g., serine and threonine); an amino acid having aromatic side chains is substituted with another amino acid having an aromatic side chain (e.g., phenylalanine, tyrosine, tryptophan, and histidine); an amino acid with a basic side chain is substituted with another amino acid with a basis side chain (e.g., lysine and arginine); an amino acid with an acidic side chain is substituted with another amino acid with an acidic side chain (e.g., aspartic acid or glutamic acid); and/or a hydrophobic or hydrophilic amino acid is replaced with another hydrophobic or hydrophilic amino acid, respectively. Exemplary conservative substitutions are provided in Table 1 below.

TABLE 1
Conservative Amino Acid Substitution Examples

| Residue | Possible Conservative Substitutions |
|---|---|
| A, L, V, I | Other aliphatic (A, L, V, I) |
| | Other non-polar (A, L, V, I, G, M) |
| G, M | Other non-polar (A, L, V, I, G, M) |
| D, E | Other acidic (D, E) |
| K, R | Other basic (K, R) |
| N, Q, S, T | Other polar |
| H, Y, W, F | Other aromatic (H, Y, W, F) |
| C, P | None |

[0046] “Non-conservative substitution” refers to substitution of an amino acid in the polypeptide with an amino acid with significantly differing side chain properties. Non-conservative substitutions may use amino acids between, rather than within, the defined groups and affects (a) the structure of the peptide backbone in the area of the substitution (e.g., proline for glycine), (b) the charge or hydrophobicity, or (c) the bulk of the side chain. By way of example and not limitation, an exemplary non-conservative substitution can be an acidic amino acid substituted with a basic or aliphatic amino acid; an aromatic amino acid substituted with a small amino acid; and a hydrophilic amino acid substituted with a hydrophobic amino acid.

[0047] “Deletion” refers to modification to the polypeptide by removal of one or more amino acids from the reference polypeptide. Deletions can comprise removal of 1 or more amino acids, 2 or more amino acids, 5 or more amino acids, 10 or more amino acids, 15 or more amino acids, or 20 or more amino acids, up to 10% of the total number of amino acids, or up to 20% of the total number of amino acids making up the reference enzyme while retaining enzymatic activity and/or retaining the improved properties of an engineered 3′O-kinase enzyme. Deletions can be directed to the internal portions and/or terminal portions of the polypeptide. In various embodiments, the deletion can comprise a continuous segment or can be discontinuous.

[0048] “Insertion” refers to modification to the polypeptide by addition of one or more amino acids from the reference polypeptide. In some embodiments, the improved engineered 3′O-kinase enzymes comprise insertions of one or more amino acids to the naturally occurring polypeptide as well as insertions of one or more amino acids to other improved 3′O-kinase polypeptides. Insertions can be in the internal portions of the polypeptide, or to the carboxy or amino terminus. Insertions as used herein include fusion proteins as is known in the art. The insertion can be a contiguous segment of amino acids or separated by one or more of the amino acids in the naturally occurring polypeptide.

[0049] “Fragment” as used herein refers to a polypeptide that has an amino-terminal and/or carboxy-terminal deletion, but where the remaining amino acid sequence is identical to the corresponding positions in the sequence. Fragments can be at least 14 amino acids long, at least 20 amino acids long, at least 50 amino acids long or longer, and up to 70%, 80%, 90%, 95%, 98%, and 99% of the full-length 3′O-kinase polypeptide, for example the polypeptide of SEQ ID NO: 2 or an 3′O-kinase provided in the even-numbered sequences of SEQ ID NOs: 4-1960.

[0050] “Isolated polypeptide” refers to a polypeptide which is substantially separated from other contaminants that naturally accompany it, e.g., protein, lipids, and polynucleotides. The term embraces polypeptides which have been removed or purified from their naturally-occurring environment or expression system (e.g., host cell or in vitro synthesis). The engineered 3′O-kinase enzymes may be present within a cell, present in the cellular medium, or prepared in various forms, such as lysates or isolated preparations. As such, in some embodiments, the engineered 3′O-kinase enzyme can be an isolated polypeptide.

[0051] “Substantially pure polypeptide” refers to a composition in which the polypeptide species is the predominant species present (i.e., on a molar or weight basis it is more abundant than any other individual macromolecular species in the composition), and is generally a substantially purified composition when the object species comprises at least about 50 percent of the macromolecular species present by mole or % weight. Generally, a substantially pure 3′O-kinase composition will comprise about 60% or more, about 70% or more, about 80% or more, about 90% or more, about 95% or more, and about 98% or more of all macromolecular species by mole or % weight present in the composition. In some embodiments, the object species is purified to essential homogeneity (i.e., contaminant species cannot be detected in the composition by conventional detection methods) wherein the composition consists essentially of a single macromolecular species. Solvent species, small molecules (<500 Daltons), and elemental ion species are not considered macromolecular species. In some embodiments, the isolated engineered 3′O-kinase polypeptide is a substantially pure polypeptide composition.

[0052] As used herein, “improved enzyme property” refers to at least one improved property of an enzyme. In some embodiments, the present invention provides engineered 3′O-kinase polypeptides that exhibit an improvement in any enzyme property as compared to a reference 3′O-kinase polypeptide and/or a wild-type 3′O-kinase polypeptide, and/or another engineered 3′O-kinase polypeptide. For the engineered 3′O-kinase polypeptides described herein, the comparison is generally made to the wild-type enzyme from which the 3′O-kinase is derived, although in some embodiments, the reference enzyme can be another improved engineered 3′O-kinase. Thus, the level of “improvement” can be determined and compared between various 3′O-kinase polypeptides, including wild-type, as well as engineered 3′O-kinases. Improved properties include, but are not limited, to such properties as enzymatic activity (which can be expressed in terms of percent conversion of the substrate), thermo stability, solvent stability, pH activity profile, cofactor requirements, refractoriness to inhibitors (e.g., substrate or product inhibition), activity at elevated temperatures, increased soluble expression, decreased by-product formation, increased specific activity substrates, and/or increased activity (including enantioselectivity).

[0053] “Increased enzymatic activity” refers to an improved property of the 3′O-kinase polypeptides, which can be represented by an increase in specific activity (e.g., product produced/time/weight protein) or an increase in percent conversion of the substrate to the product (e.g., percent conversion of starting amount of substrate to product in a specified time period using a specified amount of 3′O-kinase) as compared to the reference 3′O-kinase enzyme. Exemplary methods to determine enzyme activity are provided in the Examples. Any property relating to enzyme activity may be affected, including the classical enzyme properties of Kₘ, Vₘₐₓ or k_{cat}, changes of which can lead to increased enzymatic activity. Improvements in enzyme activity can be from about 1.2 times the enzymatic activity of the corresponding wild-type enzyme, to as much as 2 times, 5 times, 10 times, 20 times, 25 times, 50 times or more enzymatic activity than the naturally occurring or another engineered 3′O-kinase from which the 3′O-kinase polypeptides were derived. 3′O-kinase activity can be measured by any one of standard assays, such as by monitoring changes in properties of substrates, cofactors, or products. In some embodiments, the amount of products generated can be measured by Liquid Chromatography-Mass Spectrometry (LC-MS), HPLC, or other methods, as known in the art. Comparisons of enzyme activities are made using a defined preparation of enzyme, a defined assay under a set condition, and one or more defined substrates, as further described in detail herein. Generally, when lysates are compared, the numbers of cells and the amount of protein assayed are determined as well as use of identical expression systems and identical host cells to minimize variations in amount of enzyme produced by the host cells and present in the lysates.

[0054] “Conversion” refers to the enzymatic conversion of the substrate(s) to the corresponding product(s). “Percent conversion” refers to the percent of the substrate that is converted to the product within a period of time under specified conditions. Thus, the “enzymatic activity” or “activity” of a 3′O-kinase polypeptide can be expressed as “percent conversion” of the substrate to the product.

[0055] “Thermostable” refers to a 3′O-kinase polypeptide that maintains similar activity (more than 60% to 80% for example) after exposure to elevated temperatures (e.g., 40-80° C.) for a period of time (e.g., 0.5-24 hrs) compared to the wild-type enzyme exposed to the same elevated temperature.

[0056] “Solvent stable” refers to a 3′O-kinase polypeptide that maintains similar activity (more than e.g., 60% to 80%) after exposure to varying concentrations (e.g., 5-99%) of solvent (ethanol, isopropyl alcohol, dimethylsulfoxide (DMSO), tetrahydrofuran, 2-methyltetrahydrofuran, acetone, toluene, butyl acetate, methyl tert-butyl ether, etc.) for a period of time (e.g., 0.5-24 hrs) compared to the wild-type enzyme exposed to the same concentration of the same solvent.

[0057] “Thermo- and solvent stable” refers to a 3′O-kinase polypeptide that is both thermostable and solvent stable.

[0058] The term “stringent hybridization conditions” is used herein to refer to conditions under which nucleic acid hybrids are stable. As known to those of skill in the art, the stability of hybrids is reflected in the melting temperature (Tₘ) of the hybrids. In general, the stability of a hybrid is a function of ion strength, temperature, G/C content, and the presence of chaotropic agents. The Tₘ values for polynucleotides can be calculated using known methods for predicting melting temperatures (See e.g., Baldino et al., Meth. Enzymol., 168:761-777 [1989]; Bolton et al., Proc. Natl. Acad. Sci. USA 48:1390 [1962]; Bresslauer et al., Proc. Natl. Acad. Sci. USA 83:8893-8897 [1986]; Freier et al., Proc. Natl. Acad. Sci. USA 83:9373-9377 [1986]; Kierzek et al., Biochem., 25:7840-7846 [1986]; Rychlik et al., 1990, Nucl. Acids Res., 18:6409-6412 [1990] (erratum, Nucl. Acids Res., 19:698 [1991]); Sambrook et al., supra); Suggs et al., 1981, in Developmental Biology Using Purified Genes, Brown et al. [eds.], pp. 683-693, Academic Press, Cambridge, MA [1981]; and Wetmur, Crit. Rev. Biochem. Mol. Biol., 26:227-259 [1991]). In some embodiments, the polynucleotide encodes the polypeptide disclosed herein and hybridizes under defined conditions, such as moderately stringent or highly stringent conditions, to the complement of a sequence encoding an engineered 3′O-kinase enzyme of the present invention.

[0059] “Hybridization stringency” relates to hybridization conditions, such as washing conditions, in the hybridization of nucleic acids. Generally, hybridization reactions are performed under conditions of lower stringency, followed by washes of varying but higher stringency. The term “moderately stringent hybridization” refers to conditions that permit target-DNA to bind a complementary nucleic acid that has about 60% identity, preferably about 75% identity, about 85% identity to the target DNA, with greater than about 90% identity to target-polynucleotide. Exemplary moderately stringent conditions are conditions equivalent to hybridization in 50% formamide, 5× Denhart's solution, 5× SSPE, 0.2% SDS at 42° C., followed by washing in 0.2× SSPE, 0.2% SDS, at 42° C. “High stringency hybridization” refers generally to conditions that are about 10° C. or less from the thermal melting temperature Tₘ as determined under the solution condition for a defined polynucleotide sequence. In some embodiments, a high stringency condition refers to conditions that permit hybridization of only those nucleic acid sequences that form stable hybrids in 0.018M NaCl at 65° C. (i.e., if a hybrid is not stable in 0.018M NaCl at 65° C., it will not be stable under high stringency conditions, as contemplated herein). High stringency conditions can be provided, for example, by hybridization in conditions equivalent to 50% formamide, 5× Denhart's solution, 5×SSPE, 0.2% SDS at 42° C., followed by washing in 0.1×SSPE, and 0.1% SDS at 65° C. Another high stringency condition is hybridizing in conditions equivalent to hybridizing in 5×SSC containing 0.1% (w:v) SDS at 65° C. and washing in 0.1×SSC containing 0.1% SDS at 65° C. Other high stringency hybridization conditions, as well as moderately stringent conditions, are described in the references cited above.

[0060] “Heterologous” polynucleotide refers to any polynucleotide that is introduced into a host cell by laboratory techniques, and includes polynucleotides that are removed from a host cell, subjected to laboratory manipulation, and then reintroduced into a host cell.

[0061] “Codon optimized” refers to changes in the codons of the polynucleotide encoding a protein to those preferentially used in a particular organism such that the encoded protein is efficiently expressed in the organism of interest. Although the genetic code is degenerate in that most amino acids are represented by several codons, called “synonyms” or “synonymous” codons, it is well known that codon usage by particular organisms is nonrandom and biased towards particular codon triplets. This codon usage bias may be higher in reference to a given gene, genes of common function or ancestral origin, highly expressed proteins versus low copy number proteins, and the aggregate protein coding regions of an organism's genome. In some embodiments, the polynucleotides encoding the 3′O-kinase enzymes may be codon optimized for optimal production from the host organism selected for expression.

[0062] As used herein, “preferred, optimal, high codon usage bias codons” refers interchangeably to codons that are used at higher frequency in the protein coding regions than other codons that code for the same amino acid. The preferred codons may be determined in relation to codon usage in a single gene, a set of genes of common function or origin, highly expressed genes, the codon frequency in the aggregate protein coding regions of the whole organism, codon frequency in the aggregate protein coding regions of related organisms, or combinations thereof. Codons whose frequency increases with the level of gene expression are typically optimal codons for expression. A variety of methods are known for determining the codon frequency (e.g., codon usage, relative synonymous codon usage) and codon preference in specific organisms, including multivariate analysis, for example, using cluster analysis or correspondence analysis, and the effective number of codons used in a gene (See e.g., GCG CodonPreference, Genetics Computer Group Wisconsin Package; CodonW, Peden, University of Nottingham; McInerney, Bioinform., 14:372-73 [1998]; Stenico et al., Nucl. Acids Res., 222437-46 [1994]; Wright, Gene 87:23-29 [1990]). Codon usage tables are available for many different organisms (See e.g., Wada et al., Nucl. Acids Res., 20:2111-2118 [1992]; Nakamura et al., Nucl. Acids Res., 28:292 [2000]; Duret, et al., supra; Henaut and Danchin, in Escherichia coli and Salmonella, Neidhardt, et al. (eds.), ASM Press, Washington D.C., p. 2047-2066 [1996]). The data source for obtaining codon usage may rely on any available nucleotide sequence capable of coding for a protein. These data sets include nucleic acid sequences actually known to encode expressed proteins (e.g., complete protein coding sequences-CDS), expressed sequence tags (ESTS), or predicted coding regions of genomic sequences (See e.g., Mount, Bioinformatics: Sequence and Genome Analysis, Chapter 8, Cold Spring Harbor Laboratory Press, Cold Spring Harbor, N.Y. [2001]; Uberbacher, Meth. Enzymol., 266:259-281 [1996]; and Tiwari et al., Comput. Appl. Biosci., 13:263-270 [1997]).

[0063] “Control sequence” is defined herein to include all components, which are necessary or advantageous for the expression of a polynucleotide and/or polypeptide of the present invention. Each control sequence may be native or foreign to the nucleic acid sequence encoding the polypeptide. Such control sequences include, but are not limited to, a leader, polyadenylation sequence, propeptide sequence, promoter, signal peptide sequence, and transcription terminator. At a minimum, the control sequences include a promoter, and transcriptional and translational stop signals. The control sequences may be provided with linkers for the purpose of introducing specific restriction sites facilitating ligation of the control sequences with the coding region of the nucleic acid sequence encoding a polypeptide.

[0064] “Operably linked” is defined herein as a configuration in which a control sequence is appropriately placed (i.e., in a functional relationship) at a position relative to a polynucleotide of interest such that the control sequence directs or regulates the expression of the polynucleotide and/or polypeptide of interest.

[0065] “Promoter sequence” refers to a nucleic acid sequence that is recognized by a host cell for expression of a polynucleotide of interest, such as a coding sequence. The promoter sequence contains transcriptional control sequences, which mediate the expression of a polynucleotide of interest. The promoter may be any nucleic acid sequence which shows transcriptional activity in the host cell of choice including mutant, truncated, and hybrid promoters, and may be obtained from genes encoding extracellular or intracellular polypeptides either homologous or heterologous to the host cell.

[0066] “Suitable reaction conditions” refer to those conditions in the biocatalytic reaction solution (e.g., ranges of enzyme loading, substrate loading, cofactor loading, temperature, pH, buffers, co-solvents, etc.) under which a 3′O-kinase polypeptide of the present invention is capable of converting one or more substrate compounds to a product compound. Exemplary “suitable reaction conditions” are provided in the present invention and illustrated by the Examples.

[0067] “Composition” refers to a mixture or combination of one or more substances, wherein each substance or component of the composition retains its individual properties. As used herein, a biocatalytic composition refers to a combination of one or more substances useful for biocatalysis.

[0068] “Loading”, such as in “compound loading” or “enzyme loading” or “cofactor loading” refers to the concentration or amount of a component in a reaction mixture at the start of the reaction.

[0069] “Substrate” in the context of a biocatalyst mediated process refers to the compound or molecule acted on by the biocatalyst. For example, a 3′O-kinase biocatalyst used in the synthesis processes disclosed herein acts on a natural or modified NTP.

[0070] “Product” in the context of a biocatalyst mediated process refers to the compound or molecule resulting from the action of the biocatalyst. For example, an exemplary product for a 3′O-kinase biocatalyst used in a process disclosed herein is an NQP.

[0071] “Alkyl” refers to saturated hydrocarbon groups of from 1 to 18 carbon atoms inclusively, either straight chained or branched, more preferably from 1 to 8 carbon atoms inclusively, and most preferably 1 to 6 carbon atoms inclusively. An alkyl with a specified number of carbon atoms is denoted in parenthesis (e.g., (C₁-C₆)alkyl refers to an alkyl of 1 to 6 carbon atoms).

[0072] “Alkenyl” refers to hydrocarbon groups of from 2 to 12 carbon atoms inclusively, either straight or branched containing at least one double bond but optionally containing more than one double bond.

[0073] “Alkynyl” refers to hydrocarbon groups of from 2 to 12 carbon atoms inclusively, either straight or branched containing at least one triple bond but optionally containing more than one triple bond, and additionally optionally containing one or more double bonded moieties.

[0074] “Heteroalkyl, “heteroalkenyl,” and heteroalkynyl,” refer respectively, to alkyl, alkenyl and alkynyl as defined herein in which one or more of the carbon atoms are each independently replaced with the same or different heteroatoms or heteroatomic groups. Heteroatoms and/or heteroatomic groups which can replace the carbon atoms include, but are not limited to-O—, —S—, —S—O—, —NR^{γ}—, —PH—, —S(O)—, —S(O)2-, —S(O) NR^{γ}—, —S(O)₂NR^{γ}, and the like, including combinations thereof, where each Rr is independently selected from hydrogen, alkyl, cycloalkyl, heterocycloalkyl, aryl, and heteroaryl.

[0075] “Amino” refers to the group —NH₂. Substituted amino refers to the group —NHR^{η}, NR^{η}Rη, and NR^{η}R^{η}R^{η}, where each R^{η} is independently selected from substituted or unsubstituted alkyl, cycloalkyl, cycloheteroalkyl, alkoxy, aryl, heteroaryl, heteroarylalkyl, acyl, alkoxycarbonyl, sulfanyl, sulfinyl, sulfonyl, and the like. Typical amino groups include, but are limited to, dimethylamino, diethylamino, trimethylammonium, triethylammonium, methylysulfonylamino, furanyl-oxy-sulfamino, and the like.

[0076] “Aminoalkyl” refers to an alkyl group in which one or more of the hydrogen atoms are replaced with one or more amino groups, including substituted amino groups.

[0077] “Aminocarbonyl” refers to —C(O)NH₂. Substituted aminocarbonyl refers to —C(O)NRηR^{η}, where the amino group NR^{η}R^{η} is as defined herein.

[0078] “Oxy” refers to a divalent group —O—, which may have various substituents to form different oxy groups, including ethers and esters.

[0079] “Alkoxy” or “alkyloxy” are used interchangeably herein to refer to the group —OR, wherein R is an alkyl group, including optionally substituted alkyl groups.

[0080] “Carboxy” refers to —COOH.

[0081] “Carbonyl” refers to —C(O)—, which may have a variety of substituents to form different carbonyl groups including acids, acid halides, aldehydes, amides, esters, and ketones.

[0082] “Carboxyalkyl” refers to an alkyl in which one or more of the hydrogen atoms are replaced with one or more carboxy groups.

[0083] “Aminocarbonylalkyl” refers to an alkyl substituted with an aminocarbonyl group, as defined herein.

[0084] “Halogen” or “halo” refers to fluoro, chloro, bromo and iodo.

[0085] “Haloalkyl” refers to an alkyl group in which one or more of the hydrogen atoms are replaced with a halogen. Thus, the term “haloalkyl” is meant to include monohaloalkyls, dihaloalkyls, trihaloalkyls, etc. up to perhaloalkyls. For example, the expression “(C₁-C₂) haloalkyl” includes 1-fluoromethyl, difluoromethyl, trifluoromethyl, 1-fluoroethyl, 1,1-difluoroethyl, 1,2-difluoroethyl, 1,1,1 trifluoroethyl, perfluoroethyl, etc.

[0086] “Hydroxy” refers to —OH.

[0087] “Hydroxyalkyl” refers to an alkyl group in which in which one or more of the hydrogen atoms are replaced with one or more hydroxy groups.

[0088] “Thiol” or “sulfanyl” refers to —SH. Substituted thiol or sulfanyl refers to —S—R^{η}, where R^{η} is an alkyl, aryl or other suitable substituent.

[0089] “Sulfonyl” refers to —SO₂—. Substituted sulfonyl refers to —SO₂—R^{η}, where R^{η} is an alkyl, aryl or other suitable substituent.

[0090] “Alkylsulfonyl” refers to —SO₂—R^{ζ}, where R^{ζ} is an alkyl, which can be optionally substituted. Typical alkylsulfonyl groups include, but are not limited to, methylsulfonyl, ethylsulfonyl, n-propylsulfonyl, and the like.

[0091] “Phosphate” as used herein refers to a functional group comprised of an orthophosphate ion (phosphorous atom covalently linked to four oxygen atoms). The orthophosphate ion is commonly found with one or more hydrogen atoms or organic groups. A phosphate group or chain may be modified, as further described herein.

[0092] “Phosphorylated” as used herein refers to the addition or presence of one of more phosphoryl groups (phosphorous atom covalently linked to the three oxygen atoms).

[0093] “thiophosphate” refers to an instance where a non-bridging oxygen in a phosphate group of a phosphodiester bond, NMP, NDP, NTP or NQP is replaced with a sulfur.

[0094] “dithiophosphate” refers to an instance where two non-bridging oxygens in a phosphate group of a phosphodiester bond, NMP, NDP, NTP or NQP are replaced with two sulfurs

[0095] “Optionally substituted” as used herein with respect to the foregoing chemical groups means that positions of the chemical group occupied by hydrogen can be substituted with another atom (unless otherwise specified) exemplified by, but not limited to carbon, oxygen, nitrogen, or sulfur, or a chemical group, exemplified by, but not limited to, hydroxy, oxo, nitro, methoxy, ethoxy, alkoxy, substituted alkoxy, trifluoromethoxy, haloalkoxy, fluoro, chloro, bromo, iodo, halo, methyl, ethyl, propyl, butyl, alkyl, alkenyl, alkynyl, substituted alkyl, trifluoromethyl, haloalkyl, hydroxyalkyl, alkoxyalkyl, thio, alkylthio, acyl, carboxy, alkoxycarbonyl, carboxamido, substituted carboxamido, alkylsulfonyl, alkylsulfinyl, alkylsulfonylamino, sulfonamido, substituted sulfonamido, cyano, amino, substituted amino, alkylamino, dialkylamino, aminoalkyl, acylamino, amidino, amidoximo, hydroxamoyl, phenyl, aryl, substituted aryl, aryloxy, arylalkyl, arylalkenyl, arylalkynyl, pyridyl, imidazolyl, heteroaryl, substituted heteroaryl, heteroaryloxy, heteroarylalkyl, heteroarylalkenyl, heteroarylalkynyl, cyclopropyl, cyclobutyl, cyclopentyl, cyclohexyl, cycloalkyl, cycloalkenyl, cycloalkylalkyl, substituted cycloalkyl, cycloalkyloxy, pyrrolidinyl, piperidinyl, morpholino, heterocycle, (heterocycle)oxy, and (heterocycle)alkyl; where preferred heteroatoms are oxygen, nitrogen, and sulfur. Additionally, where open valences exist on these substitute chemical groups they can be further substituted with alkyl, cycloalkyl, aryl, heteroaryl, and/or heterocycle groups, that where these open valences exist on carbon they can be further substituted by halogen and by oxygen-, nitrogen-, or sulfur-bonded substituents, and where multiple such open valences exist, these groups can be joined to form a ring, either by direct formation of a bond or by formation of bonds to a new heteroatom, preferably oxygen, nitrogen, or sulfur. It is further contemplated that the above substitutions can be made provided that replacing the hydrogen with the substituent does not introduce unacceptable instability to the molecules of the present invention, and is otherwise chemically reasonable. One of ordinary skill in the art would understand that with respect to any chemical group described as optionally substituted, only sterically practical and/or synthetically feasible chemical groups are meant to be included. “Optionally substituted” as used herein refers to all subsequent modifiers in a term or series of chemical groups. For example, in the term “optionally substituted arylalkyl,” the “alkyl” portion and the “aryl” portion of the molecule may or may not be substituted, and for the series “optionally substituted alkyl, cycloalkyl, aryl and heteroaryl,” the alkyl, cycloalkyl, aryl, and heteroaryl groups, independently of the others, may or may not be substituted.

[0096] “Reaction” as used herein refers to a process in which one or more substances or compounds or substrates is converted into one or more different substances, compounds, or processes.

### Enzymatic Synthesis of Natural and Modified Nucleoside Tetraphosphates (NQPs)

### 3′O-Kinase Mediated NQP Synthesis

[0097] New methods to synthesize natural and modified NQPs are necessary to enable production of oligonucleotides on the scale required for modern synthetic biology applications.

[0098] The present disclosure provides methods to synthesize natural and modified NTPs using one or more enzymes. In some embodiments, the present disclosure provides enzymes for the conversion of an NTP to an NTP with a phosphate group at the 3′ position of the sugar (known herein as a nucleoside tetraphosphate, pppNp, or NQP), as depicted in Scheme 1.

[chemical structure]

[0099] As depicted in Scheme 1, the NTP is converted by a 3′O-kinase to a nucleoside tetraphosphate (NQP or pppNp) with the fourth phosphate group at the 3′ position of the sugar. The group R at the 2′ position of the sugar (“2′-R group”) may be an atom or group selected from H, OH, OCH₃, OCH₂CH₂OCH₃ F, and CO₂R′ (where R′ is any alkyl or aryl), or another atom or chemical group. Additionally, the sugar may have other modifications at other positions. The nucleobase may be a uridine, thymine, cytosine, adenine, guanine or another nucleobase known to those skilled in the art. Although not depicted in Scheme 1, the NTP may also have modifications of the nucleobase or of the 5′ phosphate chain. Any of these modifications may be present in any combination in the 3′O-kinase substrate or may be added after or during conversion to the 3′O-kinase product.

[0100] In the embodiment depicted in Scheme 1, the 3′O-kinase uses an NTP as a co-substrate and phosphate donor, simultaneously producing an NDP. An acetate kinase enzyme (ACK) is used to recycle the NTP donor from NDP using acetyl-phosphate as a donor substrate that is converted to acetate. In some embodiments, the phosphate donor NTP is a different type of NTP than the substrate NTP (e.g. ATP donor versus GTP substrate or ATP donor versus 2′-F-ATP substrate). However, this is only one embodiment of the present invention, which is not intended to be so limited. The phosphate used by the 3′O-kinase may be sourced from any suitable molecule, with or without a recycling enzyme, as is known by those of skill in the art.

[0101] In certain embodiments where the 3′O-kinase enzyme is coupled with an ACK recycling enzyme, the ACK enzyme may be further coupled with a pyruvate oxidase enzyme (POX) to generate acetyl phosphate from pyruvate. In certain embodiments, the POX enzyme transiently generates acetyl phosphate from pyruvate, atmospheric oxygen, and potassium phosphate buffer. These embodiments have the advantage of generating an unstable, moisture sensitive, and expensive substrate (acetyl phosphate) from stable, readily available, and inexpensive reagents (pyruvate, atmospheric oxygen, and potassium phosphate buffer).

[0102] In some embodiments, the 3′O-kinase may catalyze one or more side reactions. In some embodiments, the side reaction produces a byproduct instead of, or in addition to an NQP. As depicted in Scheme 2, below, the byproduct may comprise a fourth phosphate on the 5′-OH phosphate chain (adenosine-5′-tetraphosphate or ppppN, denoted herein as p4A), or it may comprise a 3′ phosphate with an additional or fourth phosphate on the 5′-OH phosphate chain (3′O-phosphoadenosine-5′-tetraphosphate or ppppNp), or it may comprise an additional phosphate at the 2′ position (2′, 3′O-phosphoadenosine-5′-tetraphosphate) or 3′ position (3′O-diphospohoadenosdine-5′triphosphate) of the sugar.

[chemical structure]

[0103] In some embodiments, the 3′O-kinase is more selective for the production of NQP as compared to the p4A or other byproduct species. In some embodiments, the 3′O-kinase is more selective for the production p4A or other byproduct species as compared to NQP. In some embodiments, the 3′O-kinase is 100% selective for NQP. In some embodiments, the 3′O-kinase is 100% selective for p4A.

[0104] Any suitable 3′O-kinase may be used in the present invention. Various suitable 3′O-kinases are known in the art. These include homologs of CysC enzymes (adenylyl-sulfate kinase) and CoaE (dephospho-CoA kinase). As used herein, the term 3′O-kinase refers to any of these enzymes and any enzyme capable of phosphorylation of the 3′ position of a natural or modified NTP, NDP, NMP, nucleoside, or nucleoside analog. CysC enzymes catalyze the conversion of adenosine 5′-phosphosulfate to 3′-phosphoadenylyl sulfate using ATP as a co-factor (C. Satishchandran et al., J. Biol. Chem., 1989, 264(25), 15012-15021)

[0105] Similarly, CoaE enzymes are known to catalyze the conversion of 3′-dephospho-CoA to CoA, using ATP as a co-factor (Satishchandran C. et al. Biochemistry 1992, 31, 47, 11684-11688). Various 3′O-kinase enzymes that may be used in the present invention are presented, below, in the Examples.

[0106] In some embodiments, the present disclosure provides novel 3′O-kinases that have improved activity in the conversion of an NTP to an NQP or pppNp (an NTP with a phosphate group at the 3′ position of the sugar). The 3′O-kinases of the present disclosure have increased activity on natural substrates, increased activity on non-natural substrates, increased selectivity, increased substrate promiscuity, decreased product inhibition and/or decreased byproduct formation, as compared to a wild-type or reference 3′O-kinase. The engineered polypeptides of the present disclosure are variants of SEQ ID NO: 10, a wild-type dephospho-CoA kinase (CoaE) from the species Geobacillus stearothermophilus. These engineered 3′O-kinases are capable of improved activity in the production of NQPs, using the methods described herein.

[0107] In some embodiments, the present invention provides an engineered 3′O-kinase polypeptide comprising an amino acid sequence having at least 60% sequence identity to an amino acid reference sequence of SEQ ID NO: 10 and further comprising one or more amino acid residue differences as compared to the reference amino acid sequence, wherein the engineered 3′O-kinase polypeptide has increased activity, increased activity on non-natural substrates, increased selectivity, increased substrate promiscuity, decreased product inhibition, and/or decreased byproduct formation, as compared to a wild-type or reference 3′O-kinase.

[0108] In particular, the engineered 3′O-kinase polypeptides of the present disclosure have been engineered for efficient synthesis of NQPs, in the processes depicted in Scheme 1, above, and Schemes 3 and 4, below. A variety of suitable reaction conditions are known to those skilled in the art, as detailed below and in the Examples.

[0109] In some embodiments, the present disclosure provides a method of producing an NTP with a phosphate group at the 3′ position of the sugar giving an NQP (pppNp), the method comprising (i) providing a 3′O-kinase enzyme, and (ii) contacting the 3′O-kinase enzyme with an NTP under suitable reaction conditions, such that an NTP with a phosphate group at the 3′ position of the NQP (pppNp) is produced.

[0110] In any of the above embodiments, the method may further comprise an engineered 3′O-kinase comprising one or more amino acid residue substitutions as compared to a wild type or reference polypeptide. In any of the above embodiments, the method may further comprise a nucleoside, NMP, NDP, NTP, and/or NQP with one or more modifications to the sugar, the 5′ phosphate chain, or nucleobase. In any of the above embodiments, the method may further comprise providing a source of phosphate, and, optionally, one or more phosphate recycling enzymes, including but not limited to pyruvate oxidase and/or acetate kinase.

### One Pot Synthesis: One Step and Two Step Methods

[0111] In some embodiments, the present disclosure provides a one-pot method for conversion of nucleosides to NQPs, as depicted in Scheme 3 (shown in FIG. 1). In some embodiments, the one-pot method for conversion of nucleosides to NQPs occurs in one step.

[0112] In some embodiments, the present disclosure provides a one-pot method for conversion of nucleosides to NQPs, as depicted in Scheme 3. In some embodiments, the one-pot method for conversion of nucleosides to NQPs occurs in more than one step. In some embodiments, the one-pot method for conversion of nucleosides to NQPs occurs in two steps. In some embodiments, the first step comprises conversion of a nucleoside to an NTP (as depicted in Scheme 4 shown in FIG. 2), and the second step comprises conversion of the NTP to an NQP (as depicted in Scheme 1, above). In some other embodiments, the first step comprises conversion of a nucleoside to a nucleoside with a phosphate at the 3′ position, and the second step comprises conversion of the nucleoside with a phosphate at the 3′ position to an NQP.

[0113] The first step of the two step one-pot method for conversion of nucleosides to NQPs comprises use of a 5′O-kinase, a nucleotide monosphate kinase (NMPK), and an acetate kinase (ACK) to sequentially add three phosphates (or modified phosphates or phosphate substitutes) to a nucleoside to generate an NTP.

[0114] As depicted in Scheme 4, the nucleoside is first converted by a 5′O-kinase to an NMP by addition of a phosphate group to the 5′-OH position of the sugar. After conversion of the nucleoside to an NMP by the 5′O-kinase, the NMP is converted to an NDP by an NMPK. Then, the NDP is converted to an NTP by an ACK.

[0115] With reference to Scheme 4, the 2′-R group may be H, OH, O—CH₃, F, OCH₂CH₂OCH₃, CO₂R′ (where R′ is any alkyl or aryl), or another atom or chemical group. Additionally, the sugar may have other modifications at other positions. The nucleobase may be a uridine, thymine, cytosine, adenine, guanine or another nucleobase known to those skilled in the art. Although not depicted in Scheme 4, the nucleoside may also have modifications of the nucleobase or of the 5′ phosphate chain. Any of these modifications may be present in any combination in any of the substrates or products depicted in Scheme 4 or may be added after conversion to the NTP product or may be added during or after the second step of the conversion depicted in Scheme 1.

[0116] In the embodiment depicted in Scheme 4, the 5′O-kinase and NMPK use an NTP as a co-substrate and phosphate donor, simultaneously producing an NDP. In addition to catalyzing the conversion of the NDP to NTP, the ACK is used to recycle the NTP donor from NDP using acetyl phosphate as a donor substrate that is converted to acetate. However, this is only one embodiment of the present invention, which is not intended to be so limited. The phosphate used by the 5′O-kinase and NMPK may be sourced from any suitable molecule, with or without a recycling enzyme, as is known by those of skill in the art.

[0117] In certain embodiments where the 5′O-kinase and NMPK enzymes are coupled with an ACK recycling enzyme, the ACK enzyme may be further coupled with a pyruvate oxidase enzyme (POX) to generate acetyl phosphate from pyruvate, as depicted in Scheme 4. In certain embodiments, the POX enzyme transiently generates acetyl phosphate from pyruvate, atmospheric oxygen, and potassium phosphate buffer. These embodiments have the advantage of generating an unstable, moisture sensitive, and expensive substrate (acetyl phosphate) from stable, readily available, and inexpensive reagents (pyruvate, atmospheric oxygen, and potassium phosphate buffer).

[0118] The second step of the two step one-pot method for conversion of nucleosides to NQPs comprises use of a 3′O-kinase to convert the natural or modified NTP generated in step one to the NQP product. The second step of the two step one-pot method conversion of nucleosides to NQPs, is described above and depicted in Scheme 1.

[0119] Thus, the two step one-pot method for conversion of nucleosides to NQPs comprises i) a first step comprising providing a 5′OK enzyme, an NMPK enzyme, and an ACK enzyme under suitable reaction conditions for conversion of a natural or modified nucleoside to a natural or modified NTP, optionally including an ACK recycling enzyme and/or POX enzyme and/or other suitable recycling enzymes; ii) a second step comprising providing a 3′OK enzyme under suitable reaction conditions for conversion of a natural or modified NTP to a natural or modified NQP, optionally including an ACK recycling enzyme and/or POX enzyme or other suitable recycling enzymes; and iii) optionally, comprising providing one or more additional enzymes or catalysts to generate one or more modifications to a nucleoside, NMP, NDP, NTP, or NQP as part of the one-pot method.

[0120] The one step one-pot method for conversion of nucleosides to NQPs comprises i) a step comprising providing a 5′OK enzyme, an NMPK enzyme, an ACK enzyme, and a 3′OK enzyme under suitable reaction conditions for conversion of a natural or modified nucleoside to a natural or modified NQP, optionally including an ACK enzyme and/or POX enzyme and/or other suitable recycling enzymes; and ii) optionally, comprising providing one or more additional enzymes or catalysts to generate one or more modifications to a nucleoside, NMP, NDP, NTP, or NQP as part of the one-pot method.

[0121] Any suitable 5′O-kinase may be used in the present invention. Various suitable 5′O-kinases are known in the art. These include homologs of adenosine kinase (AdoK) and polynucleotide 5′-hydroxyl-kinaseAs used herein, the term 5′O-kinase refers to any of these enzymes and any enzyme capable of phosphorylation of the 5′ position of a natural or modified nucleoside. Various 5′O-kinase enzymes that may be used in the present invention are presented, below, in the Examples.

[0122] Any suitable NMPK may be used in the present invention. Various suitable NMPKs are known in the art. These include homologs of adenylate kinase (AdK) and guanylate kinase. As used herein, the term NMPK refers to any of these enzymes and any enzyme capable of phosphorylation of the 5′beta phosphate position of a natural or modified NDP. Various NMPK enzymes that may be used in the present invention are presented, below, in the Examples.

[0123] Any suitable ACK may be used in the present invention. Various suitable ACK are known in the art. These include homologs of ACK. In some embodiments, more than one ACK is used. In some embodiments, one ACK is used for conversion of a natural or modified NDP to the desired NTP product, and a different ACK is used as a recycling enzyme for the conversion of NDPs to NTPs used as cofactors in the 5′OK and NMPK reactions. Various ACK enzymes that may be used in the present invention are presented, below, in the Examples.

[0124] Any suitable POX may be used in the present invention. Various suitable POX are known in the art. These include homologs of POX. As used herein, the term POX refers to any of these enzymes and any enzyme capable of decarboxylative phosphorylation of pyruvate to generate acetyl phosphate. Various POX enzymes that may be used in the present invention are presented, below, in the Examples.

[0125] In some embodiments, the present disclosure provides a method of producing an NTP with a phosphate group at the 3′ position of the sugar or NQP (pppNp), the method comprising (i) providing a 5′O-kinase enzyme, a nucleoside monophosphate kinase enzyme, an acetate kinase enzyme, and a 3′O-kinase enzyme, and (ii) contacting the 5′O-kinase enzyme, the nucleoside monophosphate kinase enzyme, the acetate kinase enzyme, and the 3′O-kinase enzyme with a nucleoside under suitable reaction conditions, such that an NTP with a phosphate group at the 3′ position of the sugar or NQP (pppNp) is produced.

[0126] In some embodiments, the present disclosure provides a method of producing an NTP with a phosphate group at the 3′ position of the sugar or NQP (pppNp), the method comprising (i) providing a 5′O-kinase enzyme, a nucleoside monophosphate kinase enzyme, and an acetate kinase enzyme; (ii) contacting the 5′O-kinase enzyme, the nucleoside monophosphate kinase enzyme, and the acetate kinase enzyme with a nucleoside under suitable reaction conditions, such that an NTP is produced; iii) providing a 3′O-kinase enzyme; and (iv) contacting the 3′O-kinase enzyme with the NTP under suitable reaction conditions, such that an NTP with a phosphate group at the 3′ position of the sugar or NQP (pppNp) is produced.

[0127] In some embodiments, the present disclosure provides a method of producing an NTP with a phosphate group at the 3′ position of the sugar or NQP (pppNp), the method comprising i) providing a 3′O-kinase enzyme; (ii) contacting the 3′O-kinase enzyme with a nucleoside under suitable reaction conditions, such that a nucleoside with a phosphate at the 3′ position of the sugar is produced; (iii) providing a 5′O-kinase enzyme, a nucleoside monophosphate kinase enzyme, and an acetate kinase enzyme; and (iv) contacting the 5′O-kinase enzyme, the nucleoside monophosphate kinase enzyme, and the acetate kinase enzyme with a nucleoside with nucleoside with a phosphate at the 3′ position of the sugar under suitable reaction conditions, such that an NTP with a phosphate group at the 3′ position of the sugar or NQP (pppNp) is produced.

[0128] In any of the above embodiments, the method may further comprise an engineered 3′O-kinase comprising one or more amino acid residue substitutions as compared to a wild type or reference polypeptide. In any of the above embodiments, the method may further comprise a nucleoside, NMP, NDP, NTP, and/or NQP with one or more modifications. In any of the above embodiments, the method may further comprise providing a source of phosphate, and, optionally, one or more phosphate recycling enzymes, including but not limited to pyruvate oxidase and/or acetate kinase. In any of the above embodiments, the method may further comprise providing more than one 3′O-kinase in step (i).

[0129] In some embodiments, the present disclosure provides enzymes for the conversion of a nucleoside to an NMP via addition of a phosphate group to the 5′ position of the sugar. In some embodiments, the present invention provides enzymes for the conversion of an NMP to an NDP. In some embodiments, the present disclosure provides enzymes for the conversion of an NDP to an NTP. In some embodiments, the present disclosure provides enzymes for the conversion of an NTP to an NQP. In some embodiments, the present disclosure provides a one-pot method for conversion of nucleosides to NQPs. In some embodiments, the present disclosure provides a one-pot method, two step method for conversion of nucleosides to NQPs.

[0130] In any of the above embodiments, the nucleosides, NMPs, NDPs, NTPs, NQPs, p4A and other byproduct species may be natural or may comprise one or more modifications. In any of the above embodiments, the nucleosides, NMPs, NDPs, NTPs, NQPs, p4A and other byproduct species may comprise ribonucleosides, deoxyribonucleosides, dideoxynucleosides, or modified nucleosides. In any of the above embodiments, the nucleosides, NMPs, NDPs, NTPs, NQPs, p4A and other byproduct species may comprise one or more modifications to the sugar. In any of the above embodiments, the nucleosides, NMPs, NDPs, NTPs, NQPs, p4A and other byproduct species may comprise one or more modifications to the nucleobase. In any of the above embodiments, the NMPs, NDPs, NTPs, NQPs, p4A and other byproduct species may comprise an α-thiophosphate or dithiophosphate or other modification to the 5′ phosphate chain.

### Engineered 3′O-Kinase Polypeptides

[0131] The present invention provides engineered 3′O-kinase polypeptides useful in the synthesis of NQPs, as well as compositions and methods of utilizing these engineered polypeptides.

[0132] The present invention provides 3′O-kinase polypeptides, polynucleotides encoding the polypeptides, methods of preparing the polypeptides, and methods for using the polypeptides. Where the description relates to polypeptides, it is to be understood that it can describe the polynucleotides encoding the polypeptides.

[0133] Suitable reaction conditions under which the above-described improved properties of the engineered polypeptides carry out the desired reaction can be determined with respect to concentrations or amounts of polypeptide, substrate, co-substrate, buffer, solvent, pH, conditions including temperature and reaction time, and/or conditions with the polypeptide immobilized on a solid support, as further described below and in the Examples.

[0134] In some embodiments, exemplary engineered 3′O-kinases comprise an amino acid sequence that has one or more residue differences as compared to SEQ ID NO: 10 at the residue positions indicated in Tables 13.1, 13.2, 13.3, 13.4, and 13.5.

[0135] The structure and function information for the exemplary engineered polypeptides of the present invention are based on the conversion of a natural or modified NTP to a natural or modified NQP, the results of which are shown below in Tables 13.1, 13.2, 13.3, 13.4, and 13.5, as further described in the Examples. The odd numbered sequence identifiers (i.e., SEQ ID NOs) in these Tables refer to the nucleotide sequence encoding the amino acid sequence provided by the even numbered SEQ ID NOs in these Tables. Exemplary sequences are provided in the electronic sequence listing file accompanying this invention, which is hereby incorporated by reference herein. The amino acid residue differences are based on comparison to the reference sequence of SEQ ID NO: 10.

[0136] Various 3′O-kinases, have been identified in many species. These include homologs of CysC enzymes (adenylyl-sulfate kinase) and CoaE (dephospho-CoA kinase). CysC enzymes catalyze the conversion of adenosine 5′-phosphosulfate to 3′-phosphoadenylyl sulfate using ATP as a co-factor. Similarly, CoaE enzymes are known to catalyze the conversion of 3′-dephospho-CoA to CoA, using ATP as a co-factor. Other 3′O-kinases are also known in the art and may be used to practice the invention. As used herein, the term 3′O-kinase refers to any of these enzymes and any enzyme capable of phosphorylation of the 3′ position of a natural or modified NTP, NDP, NMP, or nucleoside.

[0137] The wild-type 3′O-kinase (CoaE) from Geobacillus stearothermophilus (SEQ ID NO: 10) was selected for evolution. The 3′O-kinase polypeptides of the present disclosure are engineered variants of SEQ ID NO: 10.

[0138] The polypeptides of the present disclosure have residue differences that result in improved properties necessary to develop an efficient 3′O-kinase enzyme, capable of biocatalytic synthesis of NQPs. Various residue differences, at both conserved and non-conserved positions, have been discovered to be related to improvements in various enzymes properties, including increased activity, increased activity on non-natural substrates, increased selectivity, increased substrate promiscuity, decreased product inhibition, and/or decreased byproduct formation, as compared to a wild-type or reference 3′O-kinase. Increased activity of the 3′O-kinase polypeptide may be evidenced by increased % conversion of substrate to product. The activity of each engineered 3′O-kinase relative to the reference polypeptide of SEQ ID NO: 10 was determined as conversion of the substrates described in the Examples herein. In some embodiments, a shake flask purified enzyme (SFP) is used to assess the properties of the engineered 3′O-kinases, the results of which are provided in the Examples.

[0139] In some embodiments, the specific enzyme properties are associated with the residues differences as compared to SEQ ID NO: 10 at the residue positions indicated herein. In some embodiments, residue differences affecting polypeptide expression can be used to increase expression of the engineered 3′O-kinases.

[0140] In light of the guidance provided herein, it is further contemplated that any of the exemplary engineered polypeptides comprising the even-numbered sequences of SEQ ID NOs: 56-366, or 372-2122 find use as the starting amino acid sequence for synthesizing other 3′O-kinase polypeptides, for example by subsequent rounds of evolution that incorporate new combinations of various amino acid differences from other polypeptides in Tables 13.1, 13.2, 13.3, 13.4, and 13.5, and other residue positions described herein. Further improvements may be generated by including amino acid differences at residue positions that had been maintained as unchanged throughout earlier rounds of evolution.

[0141] In some embodiments, the engineered 3′O-kinase comprises a polypeptide sequence having at least 60%, 70%, 80%, 85%, 90%, 91%, 92%, 93%, 94%, 95%, 96%, 97%, 98%, 99%, or more sequence identity to a reference sequence selected from SEQ ID NO: 10, 142, 372, 450, 496, 1042, 1180, 1412 1464, 1800, and 2078, or a functional fragment thereof, and one or more amino acid residue differences relative to the reference sequence.

[0142] In some embodiments, a reference sequence, as well as any specified amino acid sequence herein, can be described without the amino acid residues of a His-tag when present. For example, an polypeptide sequence of an engineered 3′O-kinase comprises residues 1-201 of an engineered 3′O-kinase referenced by it SEQ ID NO., where the sequence of the SEQ ID NO. includes a His-tag. It is also to be understood that the range of residues can be adapted to account for any amino acid deletions within the sequence of the 3′O-kinase polypeptide sequence.

[0143] As such, in some embodiments, the present disclosure provides an engineered 3′O-kinase comprising a polypeptide sequence having at least 60%, 70%, 80%, 85%, 90%, 91%, 92%, 93%, 94%, 95%, 96%, 97%, 98%, 99%, or more sequence identity to a reference sequence corresponding to residues 1-201 of SEQ ID NO: 10, 142, 372, 450, 496, 1042, 1180, 1412 1464, 1800, and 2078, and one or more amino acid residue differences relative to the reference sequence.

[0144] In some embodiments, the engineered 3′O-kinase comprises a polypeptide sequence having at least an amino acid residue difference at amino acid position 2, 3, 4, 5, 6, 7, 10, 11, 13, 15, 17, 19, 20, 22, 23, 25, 26, 27, 28, 29, 32, 35, 36, 38, 39, 40, 41, 44, 46, 47, 48, 49, 50, 51, 52, 53, 55, 56, 57, 58, 59, 60, 61, 62, 63, 64, 67, 68, 69, 71, 72, 74, 76, 77, 78, 79, 81, 82, 83, 84, 85, 86, 88, 89, 91, 92, 93, 94, 95, 96, 97, 98, 100, 101, 103, 104, 105, 109, 110, 111, 115, 116, 117, 121, 122, 123, 124, 125, 126, 127, 129, 130, 131, 134, 135, 136, 138, 139, 141, 142, 144, 146, 148, 149, 150, 152, 153, 156, 157, 158, 160, 161, 163, 165, 166, 167, 169, 170, 171, 173, 175, 176, 177, 178, 179, 181, 182, 184, 190, 191, 192, 194, 195, 196, 197, 198, 199, 200, 201, 202, 203, 204, 210, or 211, or combinations thereof, relative to the reference sequence of SEQ ID NO: 10, 142, 372, 450, 496, 1042, 1180, 1412 1464, 1800, and 2078.

[0145] In some embodiments, the engineered 3′O-kinase comprises a polypeptide sequence having an amino acid residue difference or amino acid residue 2L/V, 3C/D/K/L/P/V, 4G/V, 5T/Y, 6C/F/W, 7I/M/S, 10S, 11K, 13A/D/E/V, 15S, 17Q/R/S, 19C/G, 20C/T, 22A/E/S, 23A, 25A/M/V, 26T, 27F/Y, 28D/N/T/V, 29A/C, 32G/K/W, 35M/S, 36G/R/S/T, 38E/S/V, 39C/L, 40M, 41A/K/M/V, 44A/C/D/G/P, 46T, 47G/K/S, 48H, 49C/D/G/H/M/V, 50E/M/S/V, 51L/T, 52I, 53E/F/K/N/R, 55Y, 56E/M, 57A/C/W, 58C/L/T, 59S, 60C/L/V, 61E/Y, 62G, 63E/I/S/T, 64R/V, 67F, 68G/Q/R, 69R, 71A/I/Q/R/T/V/Y, 72D/H/K/L/N/Q/R/S/T, 74A/C/F/G/I/K/M/R, 76S, 76A, 77N, 78A/M, 79G/N, 81L, 82E/L/M/T, 83M, 84P, 85A/G/L/P/R/V, 86S, 88L/M, 89G/L/S, 91E, 92A/T, 93C/E/F/I/L/M/Q/T/V/Y, 94A/C, 95H/I/L/S/Y, 96I/T, 97A/N, 98I/L, 100I/R/S/W, 1011, 103C/F/I/L/M/V/Y, 104A/C/F/G/N/R/T/Y, 105A/E/G/I/K/L/M/S, 109L/R/S, 110A, 1111, 115V/W, 116S, 117G, 121L, 122A/I, 123A/I/V, 124A/H/Q/S/V/W/Y, 125C/M/P/Q/R/S/Y, 126A/C/G/L/M/P/V, 127C/M/Y, 129S, 130Q, 131I, 134H/L, 135D/F, 136A/F, 138-/S, 139-/A, 141I/P, 142D/K/Y, 144V, 146D/H/S/T, 148G/R/V, 149F/K/L/P/T, 150L/M/W, 152D/I, 153D/S/V, 156M/P, 157E/K/M, 158H, 160D/E/K/L/S, 161V, 163S/V, 1651/Q/S, 166E/I/L, 167D/I/T, 1691, 170A/C/G/I/P/Y, 171G/L/M/S/T/V, 173A/H/P/V/Y, 175W, 176G/L, 177S, 178H/M/R/S, 179M, 181N/V, 182C/E/P, 184D, 190V, 191C/D/T, 192L, 194E/G, 195P/S, 196Y, 197K/V, 1981/L, 199C/T/V, 200C/D/E/N, 201A/C/H/N/S, 202D/I/P/T, 203A/C/L/R, 204A/C/L/M/R/T, 210E/P/Q/S/T/V, or 211K, or combinations thereof, relative to the reference sequence of SEQ ID NO: 10, 142, 372, 450, 496, 1042, 1180, 1412 1464, 1800, and 2078.

[0146] In some embodiments, the engineered 3′O-kinase comprises a polypeptide sequence having at least 60%, 70%, 80%, 85%, 90%, 91%, 92%, 93%, 94%, 95%, 96%, 97%, 98%, 99%, or more sequence identity to a reference sequence selected from SEQ ID NO: 10, 142, 372, 450, 496, 1042, 1180, 1412 1464, 1800, and 2078, or a functional fragment thereof, and one or more amino acid residue differences relative to the reference sequence of SEQ ID NO: 10.

[0147] In some embodiments, the engineered 3′O-kinase comprises a polypeptide sequence having at least 60%, 70%, 80%, 85%, 90%, 91%, 92%, 93%, 94%, 95%, 96%, 97%, 98%, 99%, or more sequence identity to a reference sequence selected from an even-numbered sequence selected from SEQ ID NO: 56-366 and 372-2122, and one or more amino acid residue differences relative to the reference sequence of SEQ ID NO: 10.

[0148] In some embodiments, the engineered 3′O-kinase polypeptide comprises an amino acid sequence having at least 60%, 70%, 80%, 85%, 86%, 87%, 88%, 89%, 90%, 91%, 92%, 93%, 94%, 95%, 96%, 97%, 98%, 99% or more sequence identity to reference sequence SEQ ID NO: 10 and one or more residue differences as compared to SEQ ID NO: 10, selected from 13, 38, 39, 72, 74, 89, 93, 124, and 165. In some embodiments, the engineered 3′O-kinase polypeptide comprises an amino acid sequence having at least 60%, 70%, 80%, 85%, 86%, 87%, 88%, 89%, 90%, 91%, 92%, 93%, 94%, 95%, 96%, 97%, 98%, 99% or more sequence identity to reference sequence SEQ ID NO: 10 and one or more residue differences as compared to SEQ ID NO: 10, selected from 13A, 13V, 38E, 39L, 72R, 74K, 89L, 93Y, 124V, 124W, and 165S. In some embodiments, the engineered 3′O-kinase polypeptide comprises an amino acid sequence having at least 60%, 70%, 80%, 85%, 86%, 87%, 88%, 89%, 90%, 91%, 92%, 93%, 94%, 95%, 96%, 97%, 98%, 99% or more sequence identity to reference sequence SEQ ID NO: 10 and one or more residue differences as compared to SEQ ID NO: 10, selected from S13A, S13V, A38E, V39L, A72R, V74K, H89L, R93Y, T124V, T124W, and M165S. In the above embodiments, the engineered 3′O-kinase polypeptide may additionally comprise improved conversion of an NTP to an NQP, as compared to a reference sequence of SEQ ID NO: 10.

[0149] In some embodiments, the engineered 3′O-kinase polypeptide comprises an amino acid sequence having at least 60%, 70%, 80%, 85%, 86%, 87%, 88%, 89%, 90%, 91%, 92%, 93%, 94%, 95%, 96%, 97%, 98%, 99% or more sequence identity to reference sequence SEQ ID NO: 10 and one or more residue differences as compared to SEQ ID NO: 10, selected from 17, 41, 60, 123, 138, 138/139, 144, 148, 150, 163, 165, 177, 178, and 179. In some embodiments, the engineered 3′O-kinase polypeptide comprises an amino acid sequence having at least 60%, 70%, 80%, 85%, 86%, 87%, 88%, 89%, 90%, 91%, 92%, 93%, 94%, 95%, 96%, 97%, 98%, 99% or more sequence identity to reference sequence SEQ ID NO: 10 and one or more residue differences as compared to SEQ ID NO: 10, selected from 17R, 41M, 60L, 123A, 123I, 138-/139-, 138S, 144V, 148G, 148R, 150M, 163S, 165S, 177S, 178H, 178R, and 179M. In some embodiments, the engineered 3′O-kinase polypeptide comprises an amino acid sequence having at least 60%, 70%, 80%, 85%, 86%, 87%, 88%, 89%, 90%, 91%, 92%, 93%, 94%, 95%, 96%, 97%, 98%, 99% or more sequence identity to reference sequence SEQ ID NO: 10 and one or more residue differences as compared to SEQ ID NO: 10, selected T17R, R41M, R60L, L123A, L123I, D138-/V139-, D138S, L144V, N148G, N148R, F150M, W163S, M165S, D177S, N178H, N178R, and N179M. In the above embodiments, the engineered 3′O-kinase polypeptide may additionally comprise improved conversion of an NTP to p4A, as compared to a reference sequence of SEQ ID NO: 10.

[0150] In some embodiments, the engineered 3′O-kinase polypeptide comprises an amino acid sequence having at least 60%, 70%, 80%, 85%, 86%, 87%, 88%, 89%, 90%, 91%, 92%, 93%, 94%, 95%, 96%, 97%, 98%, 99% or more sequence identity to reference sequence SEQ ID NO: 10 and one or more residue differences as compared to SEQ ID NO: 10, selected from 13, 32, 35, 36, 39, 40, 74, 76, 89, 92, 150, and 156. In some embodiments, the engineered 3′O-kinase polypeptide comprises an amino acid sequence having at least 60%, 70%, 80%, 85%, 86%, 87%, 88%, 89%, 90%, 91%, 92%, 93%, 94%, 95%, 96%, 97%, 98%, 99% or more sequence identity to reference sequence SEQ ID NO: 10 and one or more residue differences as compared to SEQ ID NO: 10, selected from 13V, 32G, 35S, 36T, 39L, 40M, 74K, 74M, 76A, 89G, 89L, 89S, 92A, 150W, and 156M. In some embodiments, the engineered 3′O-kinase polypeptide comprises an amino acid sequence having at least 60%, 70%, 80%, 85%, 86%, 87%, 88%, 89%, 90%, 91%, 92%, 93%, 94%, 95%, 96%, 97%, 98%, 99% or more sequence identity to reference sequence SEQ ID NO: 10 and one or more residue differences as compared to SEQ ID NO: 10, selected from S13V, A32G, A35S, A36T, V39L, V40M, V74K, V74M, N76A, H89G, H89L, H89S, V92A, F150W, and L156M. In the above embodiments, the engineered 3′O-kinase polypeptide may additionally comprise improved selectivity for the NQP product, as compared to a reference sequence of SEQ ID NO: 10.

[0151] In some embodiments, the engineered 3′O-kinase polypeptide comprises an amino acid sequence having at least 60%, 70%, 80%, 85%, 86%, 87%, 88%, 89%, 90%, 91%, 92%, 93%, 94%, 95%, 96%, 97%, 98%, 99% or more sequence identity to reference sequence SEQ ID NO: 10 and one or more residue differences as compared to SEQ ID NO: 10, selected from 17, 41, 116, 123, 138/139, 144, 148, 150, 177, 178, and 179. In some embodiments, the engineered 3′O-kinase polypeptide comprises an amino acid sequence having at least 60%, 70%, 80%, 85%, 86%, 87%, 88%, 89%, 90%, 91%, 92%, 93%, 94%, 95%, 96%, 97%, 98%, 99% or more sequence identity to reference sequence SEQ ID NO: 10 and one or more residue differences as compared to SEQ ID NO: 10, selected from 17Q, 17R, 41M, 116S, 123A, 123I, 123V, 138-/139-, 144V, 148G, 148R, 150M, 177S, 178H, 178R, 178S, and 179M. In some embodiments, the engineered 3′O-kinase polypeptide comprises an amino acid sequence having at least 60%, 70%, 80%, 85%, 86%, 87%, 88%, 89%, 90%, 91%, 92%, 93%, 94%, 95%, 96%, 97%, 98%, 99% or more sequence identity to reference sequence SEQ ID NO: 10 and one or more residue differences as compared to SEQ ID NO: 10, selected from T17Q, T17R, R41M, P116S, L123A, L123I, L123V, D138-/V139-, L144V, N148G, N148R, F150M, D177S, N178H, N178R, N178S, and N179M. In the above embodiments, the engineered 3′O-kinase polypeptide may additionally comprise improved selectivity for the p4A or other byproduct species product, as compared to a reference sequence of SEQ ID NO: 10.

[0152] As will be appreciated by the skilled artisan, in some embodiments, one or a combination of residue differences above that is selected can be kept constant (i.e., maintained) in the engineered 3′O-kinase as a core feature, and additional residue differences at other residue positions incorporated into the sequence to generate additional engineered 3′O-kinase polypeptides with improved properties. Accordingly, it is to be understood for any engineered 3′O-kinase containing one or a subset of the residue differences above, the present invention contemplates other engineered 3′O-kinase that comprise the one or a subset of the residue differences, and additionally one or more residue differences at the other residue positions disclosed herein.

[0153] In some embodiments, the engineered 3′O-kinase polypeptide comprises an amino acid sequence having at least 60%, 70%, 80%, 85%, 86%, 87%, 88%, 89%, 90%, 91%, 92%, 93%, 94%, 95%, 96%, 97%, 98%, 99% or more sequence identity to reference sequence SEQ ID NO: 10 and one or more residue differences as compared to SEQ ID NO: 10, selected from 13/36/38/39/40/74/89, 13/36/38/39/40/89, 13/36/38/39/72/76/89/93/124, 13/36/38/40, 13/36/38/40/72/74, 13/36/38/40/72/74/89/93, 13/36/38/40/72/74/93/156, 13/36/38/40/72/74/124, 13/36/38/40/72/76/89, 13/36/38/40/74/76, 13/36/38/40/76/89/93, 13/36/38/40/89, 13/36/39/40/72/76/89/124, 13/36/40/72/74/76/93, 13/36/40/72/156, 13/36/40/93/124, 13/38/39/40/72/76/93/165, 13/38/39/40/89/124/156, 13/38/40/89, 13/38/72/156, 13/40, 13/40/72/76/89, 13/72, 13/72/74/76/89/93, 13/72/74/76/89/93/124, 13/72/74/89/93, 13/72/74/89/93/124, 13/72/76, 13/72/76/89/93, 13/72/76/89/124, 13/72/76/124/156, 13/72/89, 13/72/89/93/124/156, 13/72/89/124, 13/72/89/124/165, 13/72/93/124, 13/72/124, 13/74/89/93, 13/74/89/93/124, 13/74/89/156, 13/76, 13/76/89/93, 13/76/89/93/124, 13/76/89/93/156/165, 13/76/89/124/156, 13/76/89/156/165, 13/76/93, 13/76/93/124, 13/76/124, 13/89, 13/89/124, 13/89/165, 13/124, 13/156, 36/38/39/40/72/74/76/124, 36/38/39/40/72/74/89, 36/38/39/40/74/76/89/93/124, 36/38/40/72/74/89/93/124/156, 36/39/40/72/76/89/93, 36/39/40/76/93/156, 36/40/72/74/89/93, 38/39, 38/39/40/72/74/76/89, 38/39/76, 38/40/72, 38/40/76/89/124, 38/40/89/124, 38/40/93, 38/40/156, 38/72/76/89, 38/72/89/93/124, 38/76/156, 39/40/72/76, 72/74/76/89/124, 72/74/76/124, 72/74/89, 72/74/89/93, 72/74/89/93/124, 72/74/93, 72/74/93/124, 72/76, 72/76/89/93, 72/76/124, 72/89/165, 72/93/124, 74/76/89, 74/76/89/93/124, 74/76/89/124, 74/89, 74/89/93, 74/89/93/156, 74/89/124, 76/89/93/124, 76/89/93/165, 76/89/124/165, 76/89/165, 76/93, 89/93, 89/93/124, 89/124, and 124/156. In some embodiments, the engineered 3′O-kinase polypeptide comprises an amino acid sequence having at least 60%, 70%, 80%, 85%, 86%, 87%, 88%, 89%, 90%, 91%, 92%, 93%, 94%, 95%, 96%, 97%, 98%, 99% or more sequence identity to reference sequence SEQ ID NO: 10 and one or more residue differences as compared to SEQ ID NO: 10, selected from 13A/36T/38E/40M, 13A/36T/38E/40M/72R/76A/89G, 13A/36T/38E/40M/76A/89S/93Y, 13A/36T/40M/72R/74K/76A/93Y, 13A/36T/40M/93Y/124V, 13A/38E/40M/89G, 13A/38E/72R/156M, 13A/40M/72R/76A/89L, 13A/72R/76A, 13A/72R/89G, 13A/72R/89L/124W, 13A/72R/89S/93Y/124V/156M, 13A/74K/89G/156M, 13A/76A, 13A/76A/124W, 13A/89L/124V, 13A/89L/165S, 13A/89S/165S, 13A/124V, 13V/36T/38E/39L/40M/74K/89G, 13V/36T/38E/39L/40M/89L, 13V/36T/38E/39L/72R/76A/89L/93Y/124W, 13V/36T/38E/40M/72R/74K, 13V/36T/38E/40M/72R/74K/89L/93Y, 13V/36T/38E/40M/72R/74K/93Y/156M, 13V/36T/38E/40M/72R/74K/124V, 13V/36T/38E/40M/74K/76A, 13V/36T/38E/40M/89G, 13V/36T/39L/40M/72R/76A/89L/124V, 13V/36T/40M/72R/156M, 13V/38E/39L/40M/72R/76A/93Y/165S, 13V/38E/39L/40M/89L/124W/156M, 13V/38E/40M/89G, 13V/40M, 13V/72R, 13V/72R/74K/76A/89L/93Y, 13V/72R/74K/76A/89L/93Y/124V, 13V/72R/74K/89L/93Y, 13V/72R/74K/89L/93Y/124W, 13V/72R/76A, 13V/72R/76A/89G/93Y, 13V/72R/76A/89L/124V, 13V/72R/76A/124V/156M, 13V/72R/89G, 13V/72R/89L/124V/165S, 13V/72R/89L/124W, 13V/72R/93Y/124W, 13V/72R/124W, 13V/72S/74K/89L/93Y, 13V/74K/89L/93Y, 13V/74K/89L/93Y/124V, 13V/74K/89S/93Y, 13V/76A, 13V/76A/89G/93Y/124W, 13V/76A/89G/156M/165S, 13V/76A/89L/93Y/156M/165S, 13V/76A/89L/124W/156M, 13V/76A/89S/93Y, 13V/76A/93Y, 13V/76A/93Y/124V, 13V/89G, 13V/89L, 13V/89S, 13V/124V, 13V/124W, 13V/156M, 36T/38E/39L/40M/72R/74K/76A/124W, 36T/38E/39L/40M/72R/74K/89L, 36T/38E/39L/40M/74K/76A/89L/93Y/124V, 36T/38E/40M/72R/74K/89S/93Y/124W/156M, 36T/39L/40M/72R/76A/89L/93Y, 36T/39L/40M/76A/93Y/156M, 36T/40M/72R/74K/89G/93Y, 38E/39L, 38E/39L/40M/72R/74K/76A/89S, 38E/39L/76A, 38E/40M/72R, 38E/40M/76A/89L/124W, 38E/40M/89S/124W, 38E/40M/93Y, 38E/40M/156M, 38E/72R/89L/93Y/124V, 38E/76A/156M, 38V/72R/76A/89G, 39L/40M/72R/76A, 72R/74K/76A/89G/124V, 72R/74K/76A/124V, 72R/74K/89G, 72R/74K/89G/93Y, 72R/74K/89L/93Y/124V, 72R/74K/93Y, 72R/74K/93Y/124V, 72R/76A, 72R/76A/89G/93Y, 72R/76A/124V, 72R/76A/124W, 72R/89L/165S, 72R/93Y/124V, 74K/76A/89G/124V, 74K/76A/89L, 74K/76A/89L/93Y/124V, 74K/89L, 74K/89L/93Y/156M, 74K/89L/124W, 74K/89S/93Y, 76A/89G/93Y/124V, 76A/89G/93Y/165S, 76A/89G/165S, 76A/89L/124V/165S, 76A/93Y, 89L/93Y, 89L/93Y/124W, 89L/124W, and 124W/156M. In some embodiments, the engineered 3′O-kinase polypeptide comprises an amino acid sequence having at least 60%, 70%, 80%, 85%, 86%, 87%, 88%, 89%, 90%, 91%, 92%, 93%, 94%, 95%, 96%, 97%, 98%, 99% or more sequence identity to reference sequence SEQ ID NO: 10 and one or more residue differences as compared to SEQ ID NO: 10, selected from S13A/A36T/A38E/V40M, S13A/A36T/A38E/V40M/A72R/N76A/H89G, S13A/A36T/A38E/V40M/N76A/H89S/R93Y, S13A/A36T/V40M/A72R/V74K/N76A/R93Y, S13A/A36T/V40M/R93Y/T124V, S13A/A38E/V40M/H89G, S13A/A38E/A72R/L156M, S13A/V40M/A72R/N76A/H89L, S13A/A72R/N76A, S13A/A72R/H89G, S13A/A72R/H89L/T124W, S13A/A72R/H89S/R93Y/T124V/L156M, S13A/V74K/H89G/L156M, S13A/N76A, S13A/N76A/T124W, S13A/H89L/T124V, S13A/H89L/M165S, S13A/H89S/M165S, S13A/T124V, S13V/A36T/A38E/V39L/V40M/V74K/H89G, S13V/A36T/A38E/V39L/V40M/H89L, S13V/A36T/A38E/V39L/A72R/N76A/H89L/R93Y/T124W, S13V/A36T/A38E/V40M/A72R/V74K, S13V/A36T/A38E/V40M/A72R/V74K/H89L/R93Y, S13V/A36T/A38E/V40M/A72R/V74K/R93Y/L156M, S13V/A36T/A38E/V40M/A72R/V74K/T124V, S13V/A36T/A38E/V40M/V74K/N76A, S13V/A36T/A38E/V40M/H89G, S13V/A36T/V39L/V40M/A72R/N76A/H89L/T124V, S13V/A36T/V40M/A72R/L156M, S13V/A38E/V39L/V40M/A72R/N76A/R93Y/M165S, S13V/A38E/V39L/V40M/H89L/T124W/L156M, S13V/A38E/V40M/H89G, S13V/V40M, S13V/A72R, S13V/A72R/V74K/N76A/H89L/R93Y, S13V/A72R/V74K/N76A/H89L/R93Y/T124V, S13V/A72R/V74K/H89L/R93Y, S13V/A72R/V74K/H89L/R93Y/T124W, S13V/A72R/N76A, S13V/A72R/N76A/H89G/R93Y, S13V/A72R/N76A/H89L/T124V, S13V/A72R/N76A/T124V/L156M, S13V/A72R/H89G, S13V/A72R/H89L/T124V/M165S, S13V/A72R/H89L/T124W, S13V/A72R/R93Y/T124W, S13V/A72R/T124W, S13V/A72S/V74K/H89L/R93Y, S13V/V74K/H89L/R93Y, S13V/V74K/H89L/R93Y/T124V, S13V/V74K/H89S/R93Y, S13V/N76A, S13V/N76A/H89G/R93Y/T124W, S13V/N76A/H89G/L156M/M165S, S13V/N76A/H89L/R93Y/L156M/M165S, S13V/N76A/H89L/T124W/L156M, S13V/N76A/H89S/R93Y, S13V/N76A/R93Y, S13V/N76A/R93Y/T124V, S13V/H89G, S13V/H89L, S13V/H89S, S13V/T124V, S13V/T124W, S13V/L156M, A36T/A38E/V39L/V40M/A72R/V74K/N76A/T124W, A36T/A38E/V39L/V40M/A72R/V74K/H89L, A36T/A38E/V39L/V40M/V74K/N76A/H89L/R93Y/T124V, A36T/A38E/V40M/A72R/V74K/H89S/R93Y/T124W/L156M, A36T/V39L/V40M/A72R/N76A/H89L/R93Y, A36T/V39L/V40M/N76A/R93Y/L156M, A36T/V40M/A72R/V74K/H89G/R93Y, A38E/V39L, A38E/V39L/V40M/A72R/V74K/N76A/H89S, A38E/V39L/N76A, A38E/V40M/A72R, A38E/V40M/N76A/H89L/T124W, A38E/V40M/H89S/T124W, A38E/V40M/R93Y, A38E/V40M/L156M, A38E/A72R/H89L/R93Y/T124V, A38E/N76A/L156M, A38V/A72R/N76A/H89G, V39L/V40M/A72R/N76A, A72R/V74K/N76A/H89G/T124V, A72R/V74K/N76A/T124V, A72R/V74K/H89G, A72R/V74K/H89G/R93Y, A72R/V74K/H89L/R93Y/T124V, A72R/V74K/R93Y, A72R/V74K/R93Y/T124V, A72R/N76A, A72R/N76A/H89G/R93Y, A72R/N76A/T124V, A72R/N76A/T124W, A72R/H89L/M165S, A72R/R93Y/T124V, V74K/N76A/H89G/T124V, V74K/N76A/H89L, V74K/N76A/H89L/R93Y/T124V, V74K/H89L, V74K/H89L/R93Y/L156M, V74K/H89L/T124W, V74K/H89S/R93Y, N76A/H89G/R93Y/T124V, N76A/H89G/R93Y/M165S, N76A/H89G/M165S, N76A/H89L/T124V/M165S, N76A/R93Y, H89L/R93Y, H89L/R93Y/T124W, H89L/T124W, and T124W/L156M. In the above embodiments, the engineered 3′O-kinase polypeptide may additionally comprise improved conversion of an NTP to an NQP and/or improved selectivity for the NQP product, as compared to a reference sequence of SEQ ID NO: 10.

[0154] In some embodiments, the engineered 3′O-kinase polypeptide comprises an amino acid sequence having at least 60%, 70%, 80%, 85%, 86%, 87%, 88%, 89%, 90%, 91%, 92%, 93%, 94%, 95%, 96%, 97%, 98%, 99% or more sequence identity to reference sequence SEQ ID NO: 142 and one or more residue differences as compared to SEQ ID NO: 142 at a position or set of positions selected from 13/76/93, 13/76/93/198, 13/76/198, 68, 68/103/181/182, 76, 82, 82/198, 83, 86, 88, 91, 93, 93/198, 103, 111, 169, 181, 182, 191, 200, 210, and 211. In some embodiments, the engineered 3′O-kinase polypeptide comprises an amino acid sequence having at least 60%, 70%, 80%, 85%, 86%, 87%, 88%, 89%, 90%, 91%, 92%, 93%, 94%, 95%, 96%, 97%, 98%, 99% or more sequence identity to reference sequence SEQ ID NO: 142 and one or more residue differences as compared to SEQ ID NO: 142 selected from S13E/A76S/Y93Q, S13E/A76S/Y93Q/A198L, S13E/A76S/A198L, A68Q, A68R, A68G/H103V/T181N/I182E, A76S, K82E, K82T/A198I, V83M, A86S, V88L, A91E, Y93C, Y93E, Y93F, Y93I, Y93L, Y93M, Y93Q, Y93V, Y93L/A198L, H103L, H103Y, V111, V169I, T181N, 1182E, A191D, G200C, G200D, G200E, H210E, H210P, H210Q, H210S, H210T, H210V, and H211K.

[0155] In some embodiments, the engineered 3′O-kinase polypeptide comprises an amino acid sequence having at least 60%, 70%, 80%, 85%, 86%, 87%, 88%, 89%, 90%, 91%, 92%, 93%, 94%, 95%, 96%, 97%, 98%, 99% or more sequence identity to reference sequence SEQ ID NO: 372 and one or more residue differences as compared to SEQ ID NO: 372 at a position or set of positions selected from 13/40/68/74/93/157, 13/40/68/157, and 40/68/81. In some embodiments, the engineered 3′O-kinase polypeptide comprises an amino acid sequence having at least 60%, 70%, 80%, 85%, 86%, 87%, 88%, 89%, 90%, 91%, 92%, 93%, 94%, 95%, 96%, 97%, 98%, 99% or more sequence identity to reference sequence SEQ ID NO: 372 and one or more residue differences as compared to SEQ ID NO: 372 selected from E13A/V40M/A68Q/V74R/Q93L/A157K, E13A/V40M/A68R/A157K, and V40M/A68R/R81L.

[0156] In some embodiments, the engineered 3′O-kinase polypeptide comprises an amino acid sequence having at least 60%, 70%, 80%, 85%, 86%, 87%, 88%, 89%, 90%, 91%, 92%, 93%, 94%, 95%, 96%, 97%, 98%, 99% or more sequence identity to reference sequence SEQ ID NO: 450 and one or more residue differences as compared to SEQ ID NO: 450 at a position or set of positions selected from 41/46/190/191, 41/83/86/181/190/191, 41/86/181/191, 41/181/191, 41/46/86/95/111, 41/46/86/95/191, 41/86/181/190/191, 41/86/181/191, 41/95/111/181/190/191, 41/190, 46/83/190/191, 46/86/181/190/191, 46/190/191, 48, 48/81, 48/81/103, 48/103/175/200, 48/103/200, 48/135, 48/135/175, 48/135/200, 48/200, 72, 72/82/88/124/166, 72/82/166, 72/82/91/124/166/182, 72/124/166, 72/166, 72/166/182, 72/182, 81, 81/103, 81/135, 81/135/200, 81/175/200, 81/200, 82, 82/88/91/124/166/182, 82/88/91/182, 82/88/124/166, 82/124/166, 82/124/166/182, 82/166/182, 86, 88/166, 91, 91/124/166/182/201, 91/166, 103, 103/135, 103/135/200, 103/175, 103/175/200, 103/200, 124, 124/166, 124/166/182, 135, 135/175/200, 135/200, 166, 166/182, 175, 175/200, 182, and 200.

[0157] In some embodiments, the engineered 3′O-kinase polypeptide comprises an amino acid sequence having at least 60%, 70%, 80%, 85%, 86%, 87%, 88%, 89%, 90%, 91%, 92%, 93%, 94%, 95%, 96%, 97%, 98%, 99% or more sequence identity to reference sequence SEQ ID NO: 450 and one or more residue differences as compared to SEQ ID NO: 450 selected from R41K/A46T/A86S/K951/V1111, R41K/A46T/A86S/K95L/A191D, R41V/A46T/L190V/A191D, R41V/V83M/A86S/T181N/L190V/A191D, R41K/A86S/T181N/L190V/A191D, R41K/A86S/T181N/A191D, R41K/K95I/V111I/T181N/L190V/A191D, R41V/T181N/A191D, R41K/L190V, A46T/V83M/L190V/A191D, A46T/A86S/T181N/L190V/A191D, A46T/L190V/A191D, R48H, R48H/R81L, R48H/R81L/H103L, R48H/R81L/H103L/V175W/G200C, R48H/H1031/G200N, R48H/H103L/G200C, R48H/H103L/G200E, R48H/H103V/V175W/G200C, R48H/V135D, R48H/V135D/V175W, R48H/V135D/G200E, R48H/G200N, A72H, A72H/K82E/A91E, A72H/K82L/A166I, A72H/K82T/V88L/T124Q/A166E, A72H/T124Q/A1661, A72H/A166E, A72H/A166I/I182E, A72H/I182E, A72Q/K82E/A91E/T124S/A166E/I182E, R81L, R81L/H103I, R81L/H103L, R81L/H103M, R81L/V135D, R81L/V135D/G200D, R81L/V175W/G200E, R81L/V175W/G200N, R81L/G200C, R81L/G200D, K82E/V88L/A91E/I182E, K82E/A166E/I182E, K82L/V88M/A91E/T124Q/A166E/I182E, K82L/T124Q/A166L, K82L/T124S/A166I/I182E, K82L/A166E/I182E, K82M/T124Q/A166E, K82T, K82T/V88L/T124Q/A166E, A86S, V88L/A166E, A91E, A91E/T124Q/A166E/I182E/K201N, A91E/A166E, H103F/G200N, H103I, H103I/V135D, H1031/V175W, H103L/V175W/G200D, H103L, H103L/V135D/G200C, H103M, T124Q/A166E/1182E, T124Q/A1661, T124S, V135D, V135D/V175W/G200N, V135D/G200E, A166L, A166E/1182E, V175W, V175W/G200D, 1182E, G200C, G200D, and G200N.

[0158] In some embodiments, the engineered 3′O-kinase polypeptide comprises an amino acid sequence having at least 60%, 70%, 80%, 85%, 86%, 87%, 88%, 89%, 90%, 91%, 92%, 93%, 94%, 95%, 96%, 97%, 98%, 99% or more sequence identity to reference sequence SEQ ID NO: 450 and one or more residue differences as compared to SEQ ID NO: 450 at a position or set of positions selected from 3, 61, 105, 125, 126, 142, and 171. In some embodiments, the engineered 3′O-kinase polypeptide comprises an amino acid sequence having at least 60%, 70%, 80%, 85%, 86%, 87%, 88%, 89%, 90%, 91%, 92%, 93%, 94%, 95%, 96%, 97%, 98%, 99% or more sequence identity to reference sequence SEQ ID NO: 450 and one or more residue differences as compared to SEQ ID NO: 450 selected from F3V, A61E, R105K, H125Q, W126C, W126L, W126V, R142K, and R171M.

[0159] In some embodiments, the engineered 3′O-kinase polypeptide comprises an amino acid sequence having at least 60%, 70%, 80%, 85%, 86%, 87%, 88%, 89%, 90%, 91%, 92%, 93%, 94%, 95%, 96%, 97%, 98%, 99% or more sequence identity to reference sequence SEQ ID NO: 450 and one or more residue differences as compared to SEQ ID NO: 450 at a position or set of positions selected from 2, 3, 7, 19, 22, 25, 28, 29, 32, 35, 36, 44, 49, 50, 51, 57, 58, 63, 77, 78, 85, 97, 98, 100, 104, 105, 121, 122, 125, 126, 136, 153, 167, 170, 191, 201, 202, 203, and 204. In some embodiments, the engineered 3′O-kinase polypeptide comprises an amino acid sequence having at least 60%, 70%, 80%, 85%, 86%, 87%, 88%, 89%, 90%, 91%, 92%, 93%, 94%, 95%, 96%, 97%, 98%, 99% or more sequence identity to reference sequence SEQ ID NO: 450 and one or more residue differences as compared to SEQ ID NO: 450 selected from A2L, F3C, F3D, F3K, F3L, L7I, L7M, S19C, S19G, M22A, L25A, P28T, P28V, V29C, A32G, A32W, A35M, A36R, E44C, Q49G, Q49H, Q49M, I50M, V51L, G57A, I58C, I58L, G63E, D77N, E78A, E78M, N85A, N85G, N85L, N85R, L97A, L97N, A98I, K100R, K100W, I104T, R105A, S121L, G122A, H125C, H125M, H125P, H125R, W126A, W126C, W126G, D136A, E153D, E153V, E167D, K170A, A191C, K201A, K201C, G202D, G203C, S204A, S204L, and S204T.

[0160] In some embodiments, the engineered 3′O-kinase polypeptide comprises an amino acid sequence having at least 60%, 70%, 80%, 85%, 86%, 87%, 88%, 89%, 90%, 91%, 92%, 93%, 94%, 95%, 96%, 97%, 98%, 99% or more sequence identity to reference sequence SEQ ID NO: 450 and one or more residue differences as compared to SEQ ID NO: 450 at a position or set of positions selected from 2, 3, 4, 5, 6, 7, 13, 15, 17, 22, 25, 26, 28, 29, 32, 35, 36, 44, 47, 49, 50, 51, 52, 53, 55, 56, 57, 58, 59, 60, 61, 63, 77, 79, 84, 85, 92, 94, 97, 98, 100, 101, 104, 105, 109, 122, 125, 126, 127, 129, 136, 139, 142, 149, 152, 153, 167, 170, 171, 173, 191, 194, 195, 196, 197, 199, 201, 202, 203, and 204. In some embodiments, the engineered 3′O-kinase polypeptide comprises an amino acid sequence having at least 60%, 70%, 80%, 85%, 86%, 87%, 88%, 89%, 90%, 91%, 92%, 93%, 94%, 95%, 96%, 97%, 98%, 99% or more sequence identity to reference sequence SEQ ID NO: 450 and one or more residue differences as compared to SEQ ID NO: 450 selected from A2L, A2V, F3C, F3L, F3P, F3V, T4G, T4V, IST, I5Y, G6C, G6F, G6W, L7I, L7S, A13D, K15S, T17S, M22A, M22E, M22S, L25M, L25V, G26T, P28D, P28N, P28T, V29C, A32G, A32K, A32W, A35S, A36G, A36S, E44A, E44D, E44G, E44P, Y47G, Y47K, Y47S, Q49C, Q49V, I50E, I50M, I50S, I50V, V51L, V51T, A52I, A53E, A53F, A53K, A53R, G55Y, P56E, P56M, G57C, G57W, I58T, L59S, R60C, R60L, R60V, A61E, A61Y, G63I, G63S, G63T, D77N, Q79G, L84P, N85P, N85V, V92T, K94A, K94C, L97N, A98I, K100I, K100S, E101I, 1104A, 1104C, 1104G, 1104R, 1104T, 1104Y, R105E, R105G, R105I, R105K, R105L, R105M, R105S, K109L, K109R, K109S, G122I, H125C, H125P, H125Q, H125R, H125Y, W126A, W126C, W126G, W126L, W126M, W126P, W126V, V127C, V127Y, K129S, D136F, V139A, R142D, R142Y, G149F, G149K, G149L, G149P, G149T, E152D, E1521, E153S, E1671, E167T, K170C, K170G, K1701, K170P, K170Y, R171G, R171L, R171S, R171T, R171V, D173H, D173P, D173V, D173Y, A191T, H194E, H194G, Q195P, Q195S, W196Y, D197K, D197V, L199C, L199T, L199V, K201S, G202D, G202I, G202P, G202T, G203A, G203L, G203R, S204A, S204C, S204R, and S204T.

[0161] In some embodiments, the engineered 3′O-kinase polypeptide comprises an amino acid sequence having at least 60%, 70%, 80%, 85%, 86%, 87%, 88%, 89%, 90%, 91%, 92%, 93%, 94%, 95%, 96%, 97%, 98%, 99% or more sequence identity to reference sequence SEQ ID NO: 496 and one or more residue differences as compared to SEQ ID NO: 496 at a position or set of positions selected from 3/49/61/81/83/124/125/166/171, 3/49/61/81/124/125/200, 3/49/61/83, 3/49/61/83/125/166, 3/49/61/83/200, 3/49/61/124/125/171/200, 3/49/81/83/124/125/171, 3/49/81/83/124/125/200, 3/49/81/124/125/166/171, 3/49/105/124/125/200, 3/49/124/125/166/171/200, 3/49/166/171, 3/61/81/105/124/125/166/171, 3/61/81/125/166/171/200, 3/81/105/124/166, 3/81/124/125/200, 3/83/166/171, 3/166/171, 49/61/81/83, 49/61/83/105/124/125/171, 49/61/83/124/125/171, 49/61/124/125/166/171, 49/61/125/171, 49/83/105/111/124, 49/83/105/124/125/166, 49/111/124/166/171/200, 49/124/125/166, 50/60/72/86/103, 50/60/82/83/103/126/142/175/191, 50/91/126/135, 60/182, 61/81/83/166/171/200, 61/81/125/166/171/200, 61/83/124/125/200, 61/124/125/166/171/200, 61/125, 61/166, 61/200, 72/82/83/142/181/191/200, 72/86/91/97/135, 72/142/182, 82/83, 82/83/103, 83/91/94/95/126/135/191, 83/105/124/125/166/200, 83/105/166, 83/125/171, 86/94/111/126/142, 86/126/135/142, 94/126, 105, 111/126/135/175/182, 124/125, 126, 142, 182, and 200. In some embodiments, the engineered 3′O-kinase polypeptide comprises an amino acid sequence having at least 60%, 70%, 80%, 85%, 86%, 87%, 88%, 89%, 90%, 91%, 92%, 93%, 94%, 95%, 96%, 97%, 98%, 99% or more sequence identity to reference sequence SEQ ID NO: 496 and one or more residue differences as compared to SEQ ID NO: 496 selected from F3V/Q49D/A61E/R81L/V83M/T124S/H125S/A166I/R171M, F3V/Q49D/A61E/R81L/T124Q/H125Q/G200D, F3V/Q49D/A61E/R81L/T124Q/H125S/G200D, F3V/Q49D/A61E/V83M, F3V/Q49D/A61E/V83M/H125S/A166E, F3V/Q49D/A61E/V83M/G200D, F3V/Q49D/A61E/T124Q/H125Q/R171M/G200D, F3V/Q49D/R81L/V83M/T124Q/H125S/R171M, F3V/Q49D/R81L/V83M/T124S/H125S/G200D, F3V/Q49D/R81L/T124Q/H125Q/A166E/R171M, F3V/Q49D/R105K/T124Q/H125S/G200D, F3V/Q49D/T124Q/H125Q/A166I/R171M/G200D, F3V/Q49D/A166E/R171M, F3V/A61E/R81L/R105K/T124Q/H125S/A1661/R171M, F3V/A61E/R81L/H125S/A166I/R171M/G200D, F3V/R81L/R105K/T124Q/A166I, F3V/R81L/T124S/H125S/G200D, F3V/V83M/A166I/R171M, F3V/A166E/R171M, Q49D/A61E/R81L/V83M, Q49D/A61E/V83M/R105K/T124S/H125S/R171M, Q49D/A61E/V83M/T124S/H125S/R171M, Q49D/A61E/T124Q/H125S/A166I/R171M, Q49D/A61E/H125S/R171M, Q49D/V83M/R105K/V111I/T124Q, Q49D/V83M/R105K/T124Q/H125Q/A166I, Q49D/V111I/T124Q/A166E/R171M/G200D, Q49D/T124Q/H125Q/A166I, I50V/R60L/A72Q/S86A/H103L, I50V/R60L/K82E/V83M/H103M/W126L/R142K/V175W/D191A, I50V/A91E/W126V/V135D, R60L/I182E, A61E/R81L/V83M/A166I/R171M/G200D, A61E/R81L/H125S/A166E/R171M/G200D, A61E/V83M/T124Q/H125S/G200D, A61E/T124S/H125S/A166E/R171M/G200D, A61E/H125Q, A61E/A166E, A61E/G200D, A72Q/K82E/V83M/R142K/N181T/D191A/G200N, A72Q/S86A/A91E/L97N/V135D, A72Q/R142K/I182E, K82E/V83M, K82E/V83M/H103F, V83M/A91E/K94A/K951/W126L/V135D/D191A, V83M/R105K/T124S/H125S/A1661/G200D, V83M/R105K/A166E, V83M/H125S/R171M, S86A/K94A/V111I/W126L/R142K, S86A/W126L/V135D/R142K, K94A/W126L, R105K, V111I/W126V/V135D/V175W/1182E, T124Q/H125S, W126V, R142K, 1182E, and G200D.

[0162] In some embodiments, the engineered 3′O-kinase polypeptide comprises an amino acid sequence having at least 60%, 70%, 80%, 85%, 86%, 87%, 88%, 89%, 90%, 91%, 92%, 93%, 94%, 95%, 96%, 97%, 98%, 99% or more sequence identity to reference sequence SEQ ID NO: 496 and one or more residue differences as compared to SEQ ID NO: 496 at a position or set of positions selected from 3/49/61/83/200, 3/49/105/124/125/200, 72/82/83/142/181/191/200, 126, 142, and 191/200. In some embodiments, the engineered 3′O-kinase polypeptide comprises an amino acid sequence having at least 60%, 70%, 80%, 85%, 86%, 87%, 88%, 89%, 90%, 91%, 92%, 93%, 94%, 95%, 96%, 97%, 98%, 99% or more sequence identity to reference sequence SEQ ID NO: 496 and one or more residue differences as compared to SEQ ID NO: 496 selected from F3V/Q49D/A61E/V83M/G200D, F3V/Q49D/R105K/T124Q/H125S/G200D, A72Q/K82E/V83M/R142K/N181T/D191A/G200N, W126V, R142K, and D191A/G200D.

[0163] In some embodiments, the engineered 3′O-kinase polypeptide comprises an amino acid sequence having at least 60%, 70%, 80%, 85%, 86%, 87%, 88%, 89%, 90%, 91%, 92%, 93%, 94%, 95%, 96%, 97%, 98%, 99% or more sequence identity to reference sequence SEQ ID NO: 1042 and one or more residue differences as compared to SEQ ID NO: 1042 at a position or set of positions selected from 7, 7/61/85/97/126, 7/85/97/126, 13, 19, 19/53/105, 19/53/201, 19/100/105/201, 32/85/126/204, 35/50, 50/78/142, 53/58/100/105/109, 53/58/109/201, 53/100/105, 61, 79, 79/126/204, 85, 85/97, 97, 100, 105/201, 126, 171/201, and 204. In some embodiments, the engineered 3′O-kinase polypeptide comprises an amino acid sequence having at least 60%, 70%, 80%, 85%, 86%, 87%, 88%, 89%, 90%, 91%, 92%, 93%, 94%, 95%, 96%, 97%, 98%, 99% or more sequence identity to reference sequence SEQ ID NO: 1042 and one or more residue differences as compared to SEQ ID NO: 1042 selected from L71, L71/N85G/L97A/W126M, L7S/A61E/N85R/L97A/W126M, A13D, S19G, S19G/A53N/K105G, S19G/A53N/K201H, S19G/K100R/K105L/K201H, A32W/N85R/W126G/S204C, A35M/I50E, I50M/E78A/R142D, A53E/158T/K100R/K105G/K109S, A53E/K100W/K105G, A53N/158T/K109S/K201S, A61E, Q79G, Q79G/W126M/S204C, N85A, N85R/L97N, L97A, K100R, K105G/K201H, W126A, W126M, R171M/K201S, and S204M.

[0164] In some embodiments, the engineered 3′O-kinase polypeptide comprises an amino acid sequence having at least 60%, 70%, 80%, 85%, 86%, 87%, 88%, 89%, 90%, 91%, 92%, 93%, 94%, 95%, 96%, 97%, 98%, 99% or more sequence identity to reference sequence SEQ ID NO: 1042 and one or more residue differences as compared to SEQ ID NO: 1042 at a position or set of positions selected from 7/28/32/97, 7/61, 28/32/61, 28/32/71/79/97/126/204, 28/32/85, 28/32/97/126, 28/36/61, 32/36/61/85/97/126/204, 32/36/126, 32/85/126/204, 36/61/126/204, 53/100/105, 85, 85/97, 85/126, and 100/105. In some embodiments, the engineered 3′O-kinase polypeptide comprises an amino acid sequence having at least 60%, 70%, 80%, 85%, 86%, 87%, 88%, 89%, 90%, 91%, 92%, 93%, 94%, 95%, 96%, 97%, 98%, 99% or more sequence identity to reference sequence SEQ ID NO: 1042 and one or more residue differences as compared to SEQ ID NO: 1042 selected from L71/P28T/A32W/L97N, L71/A61E, P28T/A32W/A61E, P28T/A32W/G71V/Q79G/L97A/W126M/S204C, P28T/A32W/N85R, P28T/A32W/L97A/W126M, P28T/A36R/A61E, A32W/A36G/A61E/N85G/L97N/W126M/S204C, A32W/A36G/W126M, A32W/N85R/W126G/S204C, A36R/A61E/W126M/S204C, A53E/K100W/K105G, N85A, N85R/L97N, N85R/W126M, K100W/K105A, and K100W/K105G.

[0165] In some embodiments, the engineered 3′O-kinase polypeptide comprises an amino acid sequence having at least 60%, 70%, 80%, 85%, 86%, 87%, 88%, 89%, 90%, 91%, 92%, 93%, 94%, 95%, 96%, 97%, 98%, 99% or more sequence identity to reference sequence SEQ ID NO: 1042 and one or more residue differences as compared to SEQ ID NO: 1042 at a position or set of positions selected from 23, 27, 62, 67, 69, 71, 71/131, 72, 74, 93, 95, 103, 115, 117, 124, 134, 141, 146, 150, 156, 157, 158, 160, 161, 165, 166, 176, and 182. In some embodiments, the engineered 3′O-kinase polypeptide comprises an amino acid sequence having at least 60%, 70%, 80%, 85%, 86%, 87%, 88%, 89%, 90%, 91%, 92%, 93%, 94%, 95%, 96%, 97%, 98%, 99% or more sequence identity to reference sequence SEQ ID NO: 1042 and one or more residue differences as compared to SEQ ID NO: 1042 selected from R23A, L27F, L27Y, D62G, R67F, K69R, G71A, G71I, G71T, G71Y/L1311, A72D, A72K, A72N, A72T, R74F, R74G, R74I, L93T, K95S, H103F, H103M, H103V, I115V, 1115W, L117G, Q124H, Y134H, Y134L, L141I, L141P, A146D, A146S, A146T, F150L, L156P, K157E, K157M, R158H, R160D, R160L, S161V, S1651, S165Q, A166E, A166L, I176G, I176L, I182C, and I182E.

[0166] In some embodiments, the engineered 3′O-kinase polypeptide comprises an amino acid sequence having at least 60%, 70%, 80%, 85%, 86%, 87%, 88%, 89%, 90%, 91%, 92%, 93%, 94%, 95%, 96%, 97%, 98%, 99% or more sequence identity to reference sequence SEQ ID NO: 1042 and one or more residue differences as compared to SEQ ID NO: 1042 at a position or set of positions selected from 20, 27, 41, 68, 71, 72, 74, 89, 96, 103, 110, 115, 124, 150, 157, 160, 165, 181, 182, and 192. In some embodiments, the engineered 3′O-kinase polypeptide comprises an amino acid sequence having at least 60%, 70%, 80%, 85%, 86%, 87%, 88%, 89%, 90%, 91%, 92%, 93%, 94%, 95%, 96%, 97%, 98%, 99% or more sequence identity to reference sequence SEQ ID NO: 1042 and one or more residue differences as compared to SEQ ID NO: 1042 selected from A20T, L27F, K41A, Q68G, G71A, G71Q, G71R, G71T, G71V, A72D, R74A, R74C, R74F, R741, R74V, G89L, M961, H103L, H103M, T110A, I115V, Q124Y, F150L, K157M, R160E, S165I, S165Q, N181T, 1182E, and 1192L.

[0167] In some embodiments, the engineered 3′O-kinase polypeptide comprises an amino acid sequence having at least 60%, 70%, 80%, 85%, 86%, 87%, 88%, 89%, 90%, 91%, 92%, 93%, 94%, 95%, 96%, 97%, 98%, 99% or more sequence identity to reference sequence SEQ ID NO: 1042 and one or more residue differences as compared to SEQ ID NO: 1042 at a position or set of positions selected from 10, 11, 20, 38, 39, 64, 72, 74, 95, 96, 103, 115, 117, 124, 130, 135, 146, 148, 160, 161, 163, 175, 176, 178, 181, and 182. In some embodiments, the engineered 3′O-kinase polypeptide comprises an amino acid sequence having at least 60%, 70%, 80%, 85%, 86%, 87%, 88%, 89%, 90%, 91%, 92%, 93%, 94%, 95%, 96%, 97%, 98%, 99% or more sequence identity to reference sequence SEQ ID NO: 1042 and one or more residue differences as compared to SEQ ID NO: 1042 selected from G10S, 111K, A20C, A20T, A38S, V39C, E64R, E64V, A72L, R74G, K95H, K95Y, M96T, H103C, H103F, I115W, L117G, Q124A, V130Q, V135F, A146H, N148V, R160K, R160S, S161V, W163V, V175W, I176L, N178M, N181V, and 1182P.

[0168] In some embodiments, the engineered 3′O-kinase polypeptide comprises an amino acid sequence having at least 60%, 70%, 80%, 85%, 86%, 87%, 88%, 89%, 90%, 91%, 92%, 93%, 94%, 95%, 96%, 97%, 98%, 99% or more sequence identity to reference sequence SEQ ID NO: 1180 and one or more residue differences as compared to SEQ ID NO: 1180 at a position or set of positions selected from 3/25/29/60/170, 3/25/29/126, 3/25/126, 3/44/126/170, 25/44/58, 25/58/60, 44/58/60/61/126/170, 58/61/126, 127, 167/171/173, and 170. In some embodiments, the engineered 3′O-kinase polypeptide comprises an amino acid sequence having at least 60%, 70%, 80%, 85%, 86%, 87%, 88%, 89%, 90%, 91%, 92%, 93%, 94%, 95%, 96%, 97%, 98%, 99% or more sequence identity to reference sequence SEQ ID NO: 1180 and one or more residue differences as compared to SEQ ID NO: 1180 selected from V3D/L25A/V29A/R60C/K170A, V3D/L25A/V29A/W126V, V3D/L25A/W126M, V3D/E44C/W126M/K170A, L25A/I58L/R60L, L25M/E44C/158C, E44D/158L/R60L/A61E/W126C/K170A, I58L/A61E/W126M, V127M, E167D/R171L/D173A, and K170A.

[0169] In some embodiments, the engineered 3′O-kinase polypeptide comprises an amino acid sequence having at least 60%, 70%, 80%, 85%, 86%, 87%, 88%, 89%, 90%, 91%, 92%, 93%, 94%, 95%, 96%, 97%, 98%, 99% or more sequence identity to reference sequence SEQ ID NO: 1180 and one or more residue differences as compared to SEQ ID NO: 1180 at a position or set of positions selected from 17/63, 17/63/104, 17/63/104/125, 22/55/98/127, 22/55/98/167/171/173/197, 25/29/60/126, 25/36/126, 28, 44/60/61/126, 59/104/125, 63/125, 79/125/129, 98/167/171, and 127. In some embodiments, the engineered 3′O-kinase polypeptide comprises an amino acid sequence having at least 60%, 70%, 80%, 85%, 86%, 87%, 88%, 89%, 90%, 91%, 92%, 93%, 94%, 95%, 96%, 97%, 98%, 99% or more sequence identity to reference sequence SEQ ID NO: 1180 and one or more residue differences as compared to SEQ ID NO: 1180 selected from T17S/G63E, T17S/G63S/I104F/S125R, T17S/G63S/I104N, M22A/G55Y/A98I/V127M, M22A/G55Y/A98L/E167D/R171V/D173A/D197V, L25A/V29A/R60C/W126L, L25A/A36R/W126V, P28V, E44C/R60L/A61E/W126M, L59S/I104F/S125R, G63S/S125Y, Q79N/S125R/K129S, A98I/E167D/R171M, and V127M.

[0170] In some embodiments, the engineered 3′O-kinase polypeptide comprises an amino acid sequence having at least 60%, 70%, 80%, 85%, 86%, 87%, 88%, 89%, 90%, 91%, 92%, 93%, 94%, 95%, 96%, 97%, 98%, 99% or more sequence identity to reference sequence SEQ ID NO: 1412 and one or more residue differences as compared to SEQ ID NO: 1412 at a position or set of positions selected from 27, 27/68, 27/68/71/184, 27/71, 27/71/184, 27/95, 41/72/160/161, 68/71/113, 68/71/113/157/176, 68/71/157/184, 71, and 71/184. In some embodiments, the engineered 3′O-kinase polypeptide comprises an amino acid sequence having at least 60%, 70%, 80%, 85%, 86%, 87%, 88%, 89%, 90%, 91%, 92%, 93%, 94%, 95%, 96%, 97%, 98%, 99% or more sequence identity to reference sequence SEQ ID NO: 1412 and one or more residue differences as compared to SEQ ID NO: 1412 selected from L27F, L27F/Q68G, L27F/Q68G/G71A/E184D, L27F/G71Q, L27F/G71T/E184D, L27F/K95H, L27F/K95Y, K41A/A72D/R160S/S161V, Q68G/G71Q/L113M/K157R/I176L, Q68G/G71R/L113M, Q68G/G71R/K157M/E184D, G71A, G71A/E184D, and G71T/E184D.

[0171] In some embodiments, the engineered 3′O-kinase polypeptide comprises an amino acid sequence having at least 60%, 70%, 80%, 85%, 86%, 87%, 88%, 89%, 90%, 91%, 92%, 93%, 94%, 95%, 96%, 97%, 98%, 99% or more sequence identity to reference sequence SEQ ID NO: 1412 and one or more residue differences as compared to SEQ ID NO: 1412 at a position or set of positions selected from 49, 52, 61, 83, and 125. In some embodiments, the engineered 3′O-kinase polypeptide comprises an amino acid sequence having at least 60%, 70%, 80%, 85%, 86%, 87%, 88%, 89%, 90%, 91%, 92%, 93%, 94%, 95%, 96%, 97%, 98%, 99% or more sequence identity to reference sequence SEQ ID NO: 1412 and one or more residue differences as compared to SEQ ID NO: 1412 selected from D49M, D49Q, A52S, A61G, V83R, S125A, and S125E.

[0172] In some embodiments, the engineered 3′O-kinase polypeptide comprises an amino acid sequence having at least 60%, 70%, 80%, 85%, 86%, 87%, 88%, 89%, 90%, 91%, 92%, 93%, 94%, 95%, 96%, 97%, 98%, 99% or more sequence identity to reference sequence SEQ ID NO: 1412 and one or more residue differences as compared to SEQ ID NO: 1412 at a position or set of positions selected from 2, 3, 4, 13, 28, 30, 32, 35, 36, 40, 43, 45, 48, 49, 51, 52, 53, 54, 56, 57, 60, 61, 63, 76, 77, 78, 80, 81, 82, 83, 85, 86, 90, 92, 94, 97, 100, 101, 104, 109, 121, 127, 129, 133, 139, 152, 153, 154, 167, 173, 186, 191, 194, 197, and 198. In some embodiments, the engineered 3′O-kinase polypeptide comprises an amino acid sequence having at least 60%, 70%, 80%, 85%, 86%, 87%, 88%, 89%, 90%, 91%, 92%, 93%, 94%, 95%, 96%, 97%, 98%, 99% or more sequence identity to reference sequence SEQ ID NO: 1412 and one or more residue differences as compared to SEQ ID NO: 1412 selected from A2L, A2Q, A2R, A2V, A2W, V3A, V3G, V3S, T4P, T4Q, A13M, A13V, P28E, I30W, A32W, A35L, A35R, A35V, A35Y, A36E, A36G, A36P, A36S, M40R, G43E, E45L, R48E, R48P, R48V, D49G, D49M, D49N, D49V, V51A, A52D, A52L, A52Q, A52T, E53G, F54M, P56G, P56K, P56L, G57K, G57L, G57V, R60S, R60V, A61H, G63F, G63Q, S76D, S76G, S76T, D77E, D77W, E78G, E78V, Q80T, Q80V, R81W, K82D, K82H, V83E, V83L, V83Q, N85A, N85M, N85R, S86Q, P90R, V92A, V92T, K94A, K94G, K94N, K94Q, K94T, L97G, L97T, L97W, W100N, W100R, E101L, I104A, I104L, K109D, K109S, S121E, M127A, M127P, K129P, V133N, V139L, V139Q, V139R, V139T, E152L, E153V, E154Q, E154T, E167A, D173A, D173I, D173P, R186A, R186P, R186V, D191G, H194M, D197A, L198G, and L198P.

[0173] In some embodiments, the engineered 3′O-kinase polypeptide comprises an amino acid sequence having at least 60%, 70%, 80%, 85%, 86%, 87%, 88%, 89%, 90%, 91%, 92%, 93%, 94%, 95%, 96%, 97%, 98%, 99% or more sequence identity to reference sequence SEQ ID NO: 1412 and one or more residue differences as compared to SEQ ID NO: 1412 at a position or set of positions selected from 2, 19, 35, 45, 48, 49, 52, 53, 61, 76, 78, 80, 83, 85, 98, 106, 109, 121, 125, 170, 171, 194, and 195. In some embodiments, the engineered 3′O-kinase polypeptide comprises an amino acid sequence having at least 60%, 70%, 80%, 85%, 86%, 87%, 88%, 89%, 90%, 91%, 92%, 93%, 94%, 95%, 96%, 97%, 98%, 99% or more sequence identity to reference sequence SEQ ID NO: 1412 and one or more residue differences as compared to SEQ ID NO: 1412 selected from A2V, A2W, S19T, A35C, E45Q, R48G, R48K, D49G, D49N, D49Q, D49R, D49S, A52K, E53K, A61E, A61G, S76D, E78P, Q80G, V83R, V83T, N85A, N85M, N85R, N85W, A98G, S106R, K109A, S121T, S125E, K170C, K170I, K170T, R171A, R171M, R171Q, H194A, Q195A, and Q195K.

[0174] In some embodiments, the engineered 3′O-kinase polypeptide comprises an amino acid sequence having at least 60%, 70%, 80%, 85%, 86%, 87%, 88%, 89%, 90%, 91%, 92%, 93%, 94%, 95%, 96%, 97%, 98%, 99% or more sequence identity to reference sequence SEQ ID NO: 1412 and one or more residue differences as compared to SEQ ID NO: 1412 at a position or set of positions selected from 28, 40, 48, 49, 51, 57, 60, 80, 82, 83, 92, 94, 98, 100, 104, 109, 127, 171, 186, 193, 194, 195, and 198. In some embodiments, the engineered 3′O-kinase polypeptide comprises an amino acid sequence having at least 60%, 70%, 80%, 85%, 86%, 87%, 88%, 89%, 90%, 91%, 92%, 93%, 94%, 95%, 96%, 97%, 98%, 99% or more sequence identity to reference sequence SEQ ID NO: 1412 and one or more residue differences as compared to SEQ ID NO: 1412 selected from P28E, M40R, R48A, R48C, R48E, R48G, R48K, R48T, R48V, D49L, V51I, G57A, G57K, R60S, R60V, Q80T, K82H, V83L, V92A, V92T, K94A, K94G, K94R, A98G, W100N, I104V, K109D, K109M, K109S, M127T, R171L, R186S, R186V, L193V, H194A, Q195A, and L198S.

[0175] In some embodiments, the engineered 3′O-kinase polypeptide comprises an amino acid sequence having at least 60%, 70%, 80%, 85%, 86%, 87%, 88%, 89%, 90%, 91%, 92%, 93%, 94%, 95%, 96%, 97%, 98%, 99% or more sequence identity to reference sequence SEQ ID NO: 1464 and one or more residue differences as compared to SEQ ID NO: 1464 at a position or set of positions selected from 3/20/74/103, 10/23/27/38/49/113, 10/27/38/49, 10/83, 23/27/49/83/125/141, 27/49/74, 27/60/83/125, 27/83/113, 39, 41/64/72/103/160, 41/64/103/117/150/160/161, 49/60, 49/64/96/113/175, 49/68/134, 60/61, 60/175, 61/110/146/151, 64, 64/72/115/150, 64/103/150/181, 64/150/181, 64/161, 68/72/83/175, 72/103/124/160/161, 72/103/125/150/160/181, 72/124/150/160/181, 74/165, 103/182, 117/150, 150/160/181, 150/181, 151, 160/181, 182, and 192. In some embodiments, the engineered 3′O-kinase polypeptide comprises an amino acid sequence having at least 60%, 70%, 80%, 85%, 86%, 87%, 88%, 89%, 90%, 91%, 92%, 93%, 94%, 95%, 96%, 97%, 98%, 99% or more sequence identity to reference sequence SEQ ID NO: 1464 and one or more residue differences as compared to SEQ ID NO: 1464 selected from V3T/A20C/R74F/H103F, G10S/R23A/L27F/A38S/D49Q/L113A, G10S/L27F/A38S/D49M, G10S/V83R, R23A/L27F/D49Q/V83R/S125E/L141I, L27F/D49Q/R74H, L27F/R60A/V83R/S125E, L27F/V83R/L113A, V39C, K41A/E64R/A72D/H103M/R160K, K41A/E64R/H103M/L117G/F150L/R160K/S161V, D49M/R60A, D49M/G68S/Y134M, D49Q/E64A/M96T/L113A/V175E, R60A/V175E, R60L/A61P, A61P/T110A/A146H/T151G, E64R, E64R/A72D/I115V/F150L, E64R/H103M/F150L/N181T, E64R/F150L/N181T, E64R/S161V, G68S/A72L/V83R/V175E, A72D/H103M/Q124A/R160K/S161V, A72D/H103M/S125A/F150L/R160E/N181S, A72D/Q124Y/F150L/R160S/N181V, R74F/S165I, H103F/I182E, H103L/I182P, L117G/F150L, F150L/R160E/N181V, F150L/N181S, T151G, R160K/N181T, 1182E, and 1192L.

[0176] In some embodiments, the engineered 3′O-kinase polypeptide comprises an amino acid sequence having at least 60%, 70%, 80%, 85%, 86%, 87%, 88%, 89%, 90%, 91%, 92%, 93%, 94%, 95%, 96%, 97%, 98%, 99% or more sequence identity to reference sequence SEQ ID NO: 1464 and one or more residue differences as compared to SEQ ID NO: 1464 at a position or set of positions selected from 20/103/192, 52/61, 61/110/165, 64/72/115/150, 72, 72/103/125/150/160/181, and 192. In some embodiments, the engineered 3′O-kinase polypeptide comprises an amino acid sequence having at least 60%, 70%, 80%, 85%, 86%, 87%, 88%, 89%, 90%, 91%, 92%, 93%, 94%, 95%, 96%, 97%, 98%, 99% or more sequence identity to reference sequence SEQ ID NO: 1464 and one or more residue differences as compared to SEQ ID NO: 1464 selected from A20C/H103L/I192L, A52S/A61P, A61P/T110A/S165Q, E64R/A72D/I115V/F150L, A72D, A72D/H103M/S125A/F150L/R160E/N181S, and 1192L.

[0177] In some embodiments, the engineered 3′O-kinase polypeptide comprises an amino acid sequence having at least 60%, 70%, 80%, 85%, 86%, 87%, 88%, 89%, 90%, 91%, 92%, 93%, 94%, 95%, 96%, 97%, 98%, 99% or more sequence identity to reference sequence SEQ ID NO: 1464 and one or more residue differences as compared to SEQ ID NO: 1464 at a position or set of positions selected from 16, 20, 35, 68, 75, 85, 88, 89, 93, 122, 127, 134, 139, 146, 148, 150, 151, 161, 165, 182, and 182/205. In some embodiments, the engineered 3′O-kinase polypeptide comprises an amino acid sequence having at least 60%, 70%, 80%, 85%, 86%, 87%, 88%, 89%, 90%, 91%, 92%, 93%, 94%, 95%, 96%, 97%, 98%, 99% or more sequence identity to reference sequence SEQ ID NO: 1464 and one or more residue differences as compared to SEQ ID NO: 1464 selected from S16T, A20H, A20R, A35L, G68E, F75L, N85L, N85T, V88L, G89L, L93V, G122E, M127V, Y134W, V139T, A146S, N148G, F150L, T151P, S161L, S165Q, 1182R, and 1182R/G205D.

[0178] In some embodiments, the engineered 3′O-kinase polypeptide comprises an amino acid sequence having at least 60%, 70%, 80%, 85%, 86%, 87%, 88%, 89%, 90%, 91%, 92%, 93%, 94%, 95%, 96%, 97%, 98%, 99% or more sequence identity to reference sequence SEQ ID NO: 1464 and one or more residue differences as compared to SEQ ID NO: 1464 at a position or set of positions selected from 7, 18, 20, 22, 35, 67, 68, 71, 75, 81, 85, 88, 89, 121, 136, 137, 139, 141, 142, 146, 148, 150, 151, 153, 160, 161, 176, 182, 182/205, and 185. In some embodiments, the engineered 3′O-kinase polypeptide comprises an amino acid sequence having at least 60%, 70%, 80%, 85%, 86%, 87%, 88%, 89%, 90%, 91%, 92%, 93%, 94%, 95%, 96%, 97%, 98%, 99% or more sequence identity to reference sequence SEQ ID NO: 1464 and one or more residue differences as compared to SEQ ID NO: 1464 selected from L7V, V18L, A20G, A20H, M22L, A35L, A35V, R67K, G68E, G68S, G68Y, R71A, F75L, F75N, R81N, N85L, V88L, G89L, S121G, S121T, D136S, D137S, V139T, L141V, R142G, A146D, A146N, N148G, F150C, F150H, F150L, T151A, E153A, R160H, R160S, R160T, R160V, S161L, 1176L, 1182P, 1182R, 1182R/G205D, and T185A.

[0179] In some embodiments, the engineered 3′O-kinase polypeptide comprises an amino acid sequence having at least 60%, 70%, 80%, 85%, 86%, 87%, 88%, 89%, 90%, 91%, 92%, 93%, 94%, 95%, 96%, 97%, 98%, 99% or more sequence identity to reference sequence SEQ ID NO: 1464 and one or more residue differences as compared to SEQ ID NO: 1464 at a position or set of positions selected from 18, 20, 23, 29, 30, 35, 36, 37, 38, 40, 71, 85, 89, 93, 95, 113, 127, 142, 146, 161, 165, and 185. In some embodiments, the engineered 3′O-kinase polypeptide comprises an amino acid sequence having at least 60%, 70%, 80%, 85%, 86%, 87%, 88%, 89%, 90%, 91%, 92%, 93%, 94%, 95%, 96%, 97%, 98%, 99% or more sequence identity to reference sequence SEQ ID NO: 1464 and one or more residue differences as compared to SEQ ID NO: 1464 selected from V18A, A20I, A20K, A20Q, A20S, R23A, V29I, 130G, 130V, A35D, A35L, A35M, A35R, A35V, A36S, R37V, A38I, M40L, M40R, R71A, N85E, G89M, G89T, L93V, K95V, L113W, M127A, M127V, R142A, R142S, A146Q, S161L, S165Q, and T185A.

[0180] In some embodiments, the engineered 3′O-kinase polypeptide comprises an amino acid sequence having at least 60%, 70%, 80%, 85%, 86%, 87%, 88%, 89%, 90%, 91%, 92%, 93%, 94%, 95%, 96%, 97%, 98%, 99% or more sequence identity to reference sequence SEQ ID NO: 1464 and one or more residue differences as compared to SEQ ID NO: 1464 at a position or set of positions selected from 8, 11, 15, 88, 113, 133, 143, 155, and 161. In some embodiments, the engineered 3′O-kinase polypeptide comprises an amino acid sequence having at least 60%, 70%, 80%, 85%, 86%, 87%, 88%, 89%, 90%, 91%, 92%, 93%, 94%, 95%, 96%, 97%, 98%, 99% or more sequence identity to reference sequence SEQ ID NO: 1464 and one or more residue differences as compared to SEQ ID NO: 1464 selected from T8R, I11P, K15Y, V88W, L113R, V133R, R143V, A155P, and S161V.

[0181] In some embodiments, the engineered 3′O-kinase polypeptide comprises an amino acid sequence having at least 60%, 70%, 80%, 85%, 86%, 87%, 88%, 89%, 90%, 91%, 92%, 93%, 94%, 95%, 96%, 97%, 98%, 99% or more sequence identity to reference sequence SEQ ID NO: 1800 and one or more residue differences as compared to SEQ ID NO: 1800 at a position or set of positions selected from 27, 27/49/51, 27/49/171, 40, 40/92/104, 48, 48/53/60/76/80/193, 48/56/60/76/167/170/193, 49, 53/56/60/76, 56/60, 56/60/76/78/80, 56/60/85/193, 56/76/80/170, 56/76/80/193, 56/85/104, 56/167/193, 60, 60/61, 60/193, 76/80, 98, 101, 101/109/198, 125, 165, 171/186, and 186. In some embodiments, the engineered 3′O-kinase polypeptide comprises an amino acid sequence having at least 60%, 70%, 80%, 85%, 86%, 87%, 88%, 89%, 90%, 91%, 92%, 93%, 94%, 95%, 96%, 97%, 98%, 99% or more sequence identity to reference sequence SEQ ID NO: 1800 and one or more residue differences as compared to SEQ ID NO: 1800 selected from L27F, L27F/D49G/V51I, L27F/D49L/R171A, M40R, M40R/V92A/I104V, R48A, R48E/E53K/R60V/S76D/Q80T/L193V, R48E/P56L/R60V/S76D/E167A/K170T/L193V, D49N, D49Q, E53K/P56L/R60V/S76G, P56L/R60V, P56L/R60V/S76D/E78V/Q80T, P56L/R60V/N85M/L193V, P56L/S76D/Q80T/K170T, P56L/S76G/Q80T/L193V, P56L/N85M/I104V, P56L/E167A/L193V, R60A/A61E, R60V, R60V/L193V, S76G/Q80T, A98G, E101L, E101L/K109S/L198S, S125E, S165Q, R171L/R186P, and R186V.

[0182] In some embodiments, the engineered 3′O-kinase polypeptide comprises an amino acid sequence having at least 60%, 70%, 80%, 85%, 86%, 87%, 88%, 89%, 90%, 91%, 92%, 93%, 94%, 95%, 96%, 97%, 98%, 99% or more sequence identity to reference sequence SEQ ID NO: 2078 and one or more residue differences as compared to SEQ ID NO: 2078 at a position or set of positions selected from 48, 52, 100, 165, and 193. In some embodiments, the engineered 3′O-kinase polypeptide comprises an amino acid sequence having at least 60%, 70%, 80%, 85%, 86%, 87%, 88%, 89%, 90%, 91%, 92%, 93%, 94%, 95%, 96%, 97%, 98%, 99% or more sequence identity to reference sequence SEQ ID NO: 2078 and one or more residue differences as compared to SEQ ID NO: 2078 selected from R48E, A52D, W100N, S165Q, and L193V.

[0183] As noted above, the engineered 3′O-kinase polypeptides are also capable of converting substrates (e.g., a natural or modified NTP) to products (e.g., an NQP). In some embodiments, the engineered 3′O-kinase polypeptide is capable of converting the substrate compounds to the product compound with at least 1.1, 1.2 fold, 1.5 fold, 2 fold, 3 fold, 4 fold, 5 fold, 10 fold, or more activity relative to the activity of the reference polypeptide of SEQ ID NO: 10.

[0184] In some embodiments, the engineered 3′O-kinase capable of converting the substrate compounds to the product compounds with at least 1.5 fold the activity relative to SEQ ID NO: 10, comprises an amino acid sequence selected from: the even-numbered sequences in SEQ ID NOs: 56-366, or 372-2122.

[0185] In some embodiments, the engineered 3′O-kinase has an amino acid sequence comprising one or more residue differences as compared to SEQ ID NO: 10, that increases soluble expression or isolated protein yield of the engineered 3′O-kinase in a bacterial host cell, particularly in E. coli, as compared to a wild-type or engineered reference 3′O-kinase, and comprises an amino acid sequence selected from the even-numbered sequences in SEQ ID NOs: 56-366, or 372-2122.

[0186] In some embodiments, the engineered 3′O-kinase has an amino acid sequence comprising one or more residue differences as compared to SEQ ID NO: 10 that increases selectivity for either the NQP product or the p4A product of the engineered 3′O-kinase, as compared to a wild-type or engineered reference 3′O-kinase, and comprises an amino acid sequence selected from the even-numbered sequences in SEQ ID NOs: 56-366, or 372-2122.

[0187] In some embodiments, the engineered 3′O-kinase has an amino acid sequence comprising one or more residue differences as compared to SEQ ID NO: 10 that increases activity of the engineered 3′O-kinase on one or more 2′ modified NTP substrates, as compared to a wild-type or engineered reference 3′O-kinase, and comprises an amino acid sequence selected from the even-numbered sequences in SEQ ID NOs: 56-366, or 372-2122.

[0188] In some embodiments, the engineered 3′O-kinase with improved properties has an amino acid sequence comprising a sequence selected from the even-numbered sequences in the range of SEQ ID NOs: 56-366, or 372-2122.

[0189] In some embodiments, the engineered 3′O-kinase, comprises an amino acid sequence having at least 80%, 85%, 86%, 87%, 88%, 89%, 90%, 91%, 92%, 93%, 94%, 95%, 96%, 97%, 98%, or 99% identity to one of the even-numbered sequences in the range of SEQ ID NOs: 56-366, or 372-2122, as provided in the Examples.

[0190] In addition to the residue positions specified above, any of the engineered 3′O-kinase polypeptides disclosed herein can further comprise other residue differences relative to SEQ ID NO:10, at other residue positions (i.e., residue positions other than those included herein). Residue differences at these other residue positions can provide for additional variations in the amino acid sequence without adversely affecting the ability of the polypeptide to carry out the conversion of substrate to product. Accordingly, in some embodiments, in addition to the amino acid residue differences present in any one of the engineered 3′O-kinase polypeptides selected from the even-numbered sequences in the range of SEQ ID NOs: 56-366, or 372-2122, the sequence can further comprise 1-2, 1-3, 1-4, 1-5, 1-6, 1-7, 1-8, 1-9, 1-10, 1-11, 1-12, 1-14, 1-15, 1-16, 1-18, 1-20, 1-22, 1-24, 1-26, 1-30, 1-35, 1-40, 1-45, 1-50, 1-100, or 1-150 residue differences at other amino acid residue positions as compared to the SEQ ID NO: 10. In some embodiments, the number of amino acid residue differences as compared to the reference sequence can be 1, 2, 3, 4, 5, 6, 7, 8, 9, 10, 11, 12, 13, 14, 15, 16, 17, 18, 19, 20, 21, 22, 23, 24, 25, 30, 30, 35, 40, 45, 50, 100, or 150 residue positions. In some embodiments, the number of amino acid residue differences as compared to the reference sequence can be 1, 2, 3, 4, 5, 6, 7, 8, 9, 10, 11, 12, 13, 14, 15, 16, 18, 20, 21, 22, 23, 24, or 25 residue positions. The residue differences at these other positions can be conservative changes or non-conservative changes. In some embodiments, the residue differences can comprise conservative substitutions and non-conservative substitutions as compared to the 3′O-kinase polypeptide of SEQ ID NO: 10.

[0191] In some embodiments, the present invention also provides engineered polypeptides that comprise a fragment of any of the engineered 3′O-kinase polypeptides described herein that retains the functional activity and/or improved property of that engineered 3′O-kinase. Accordingly, in some embodiments, the present invention provides a polypeptide fragment capable of converting substrate to product under suitable reaction conditions, wherein the fragment comprises at least about 90%, 95%, 96%, 97%, 98%, or 99% of a full-length or truncated amino acid sequence of an engineered 3′O-kinase of the present invention, such as an exemplary 3′O-kinase polypeptide selected from the even-numbered sequences in the range of SEQ ID NOs: 56-366, or 372-2122. In some embodiments, the engineered 3′O-kinase can have an amino acid sequence comprising a deletion in any one of the 3′O-kinase polypeptide sequences described herein, such as the exemplary engineered polypeptides of the even-numbered sequences in the range of SEQ ID NOs: 56-366, or 372-2122.

[0192] Thus, for each and every embodiment of the engineered 3′O-kinase polypeptides of the invention, the amino acid sequence can comprise deletions of one or more amino acids, 2 or more amino acids, 3 or more amino acids, 4 or more amino acids, 5 or more amino acids, 6 or more amino acids, 8 or more amino acids, 10 or more amino acids, 15 or more amino acids, or 20 or more amino acids, up to 10% of the total number of amino acids, up to 20% of the total number of amino acids, or up to 30% of the total number of amino acids of the 3′O-kinase polypeptides, where the associated functional activity and/or improved properties of the engineered 3′O-kinase described herein are maintained. In some embodiments, the deletions can comprise 1-2, 1-3, 1-4, 1-5, 1-6, 1-7, 1-8, 1-9, 1-10, 1-15, 1-20, 1-21, 1-22, 1-23, 1-24, 1-25, 1-30, 1-35, 1-40, 1-45, or 1-50 amino acid residues. In some embodiments, the number of deletions can be 1,2,3,4,5, 6,7, 8,9, 10, 11, 12, 13, 14, 15, 16, 17, 18, 19, 20, 21, 22, 23, 24, 25, 30, 30, 35, 40, 45, or 50 amino acid residues. In some embodiments, the deletions can comprise deletions of 1, 2, 3, 4, 5, 6, 7, 8, 9, 10, 11, 12, 13, 14, 15, 16, 18, 20, 21, 22, 23, 24, or 25 amino acid residues.

[0193] In some embodiments, the engineered 3′O-kinase polypeptide described herein can have an amino acid sequence comprising an insertion as compared to any one of the engineered 3′O-kinase polypeptides described herein, such as the exemplary engineered polypeptides of the even-numbered sequences in the range of SEQ ID NOs: 56-366, or 372-2122. Thus, for each and every embodiment of the 3′O-kinase polypeptides of the invention, the insertions can comprise one or more amino acids, 2 or more amino acids, 3 or more amino acids, 4 or more amino acids, 5 or more amino acids, 6 or more amino acids, 8 or more amino acids, 10 or more amino acids, 15 or more amino acids, 20 or more amino acids, 30 or more amino acids, 40 or more amino acids, or 50 or more amino acids, where the associated functional activity and/or improved properties of the engineered 3′O-kinase described herein is maintained. The insertions can be to amino or carboxy terminus, or internal portions of the 3′O-kinase polypeptide.

[0194] In some embodiments, the engineered 3′O-kinase described herein can have an amino acid sequence comprising a sequence selected from the even-numbered sequences in the range of SEQ ID NOs: 56-366, or 372-2122, and optionally one or several (e.g., up to 3, 4, 5, or up to 10) amino acid residue deletions, insertions and/or substitutions. In some embodiments, the amino acid sequence has optionally 1-2, 1-3, 1-4, 1-5, 1-6, 1-7, 1-8, 1-9, 1-10, 1-15, 1-20, 1-21, 1-22, 1-23, 1-24, 1-25, 1-30, 1-35, 1-40, 1-45, 1-50, 1-75, 1-100, or 1-150 amino acid residue deletions, insertions and/or substitutions. In some embodiments, the amino acid sequence has optionally around 1, 2, 3, 4, 5, 6, 7, 8, 9, 10, 11, 12, 13, 14, 15, 16, 17, 18, 19, 20, 21, 22, 23, 24, 25, 30, 30, 35, 40, 45, 50, 55, 60, 65, 70, 80, 90, 100, 110, 120, 130, 140, or 150 amino acid residue deletions, insertions and/or substitutions. In some embodiments, the substitutions can be conservative or non-conservative substitutions.

[0195] In the above embodiments, the suitable reaction conditions for the engineered polypeptides are provided as described in the Examples herein.

[0196] In some embodiments, the polypeptides of the present invention are fusion polypeptides in which the engineered polypeptides are fused to other polypeptides, such as, by way of example and not limitation, antibody tags (e.g., myc epitope), purification sequences (e.g., His tags for binding to metals), and cell localization signals (e.g., secretion signals). Thus, the engineered polypeptides described herein can be used with or without fusions to other polypeptides.

[0197] It is to be understood that the polypeptides described herein are not restricted to the genetically encoded amino acids. In addition to the genetically encoded amino acids, the polypeptides described herein may be comprised, either in whole or in part, of naturally occurring and/or synthetic non-encoded amino acids. Certain commonly encountered non-encoded amino acids of which the polypeptides described herein may be comprised include, but are not limited to: the D-stereoisomers of the genetically-encoded amino acids; 2,3-diaminopropionic acid (Dpr); α-aminoisobutyric acid (Aib); s-aminohexanoic acid (Aha); 6-aminovaleric acid (Ava); N-methylglycine or sarcosine (MeGly or Sar); ornithine (Orn); citrulline (Cit); t-butylalanine (Bua); t-butylglycine (Bug); N-methylisoleucine (MeIle); phenylglycine (Phg); cyclohexylalanine (Cha); norleucine (Nle); naphthylalanine (Nal); 2-chlorophenylalanine (Ocf); 3-chlorophenylalanine (Mcf); 4-chlorophenylalanine (Pcf); 2-fluorophenylalanine (Off); 3-fluorophenylalanine (Mff); 4-fluorophenylalanine (Pff); 2-bromophenylalanine (Obf); 3-bromophenylalanine (Mbf); 4-bromophenylalanine (Pbf); 2-methylphenylalanine (Omf); 3-methylphenylalanine (Mmf); 4-methylphenylalanine (Pmf); 2-nitrophenylalanine (Onf); 3-nitrophenylalanine (Mnf); 4-nitrophenylalanine (Pnf); 2-cyanophenylalanine (Ocf); 3-cyanophenylalanine (Mcf); 4-cyanophenylalanine (Pcf); 2-trifluoromethylphenylalanine (Otf); 3-trifluoromethylphenylalanine (Mtf); 4-trifluoromethylphenylalanine (Ptf); 4-aminophenylalanine (Paf); 4-iodophenylalanine (Pif); 4-aminomethylphenylalanine (Pamf); 2,4-dichlorophenylalanine (Opef); 3,4-dichlorophenylalanine (Mpcf); 2,4-difluorophenylalanine (Opff); 3,4-difluorophenylalanine (Mpff); pyrid-2-ylalanine (2pAla); pyrid-3-ylalanine (3pAla); pyrid-4-ylalanine (4pAla); naphth-1-ylalanine (1nAla); naphth-2-ylalanine (2nAla); thiazolylalanine (taAla); benzothienylalanine (bAla); thienylalanine (tAla); furylalanine (fAla); homophenylalanine (hPhe); homotyrosine (hTyr); homotryptophan (hTrp); pentafluorophenylalanine (5ff); styrylkalanine (sAla); authrylalanine (aAla); 3,3-diphenylalanine (Dfa); 3-amino-5-phenypentanoic acid (Afp); penicillamine (Pen); 1,2,3,4-tetrahydroisoquinoline-3-carboxylic acid (Tic); β-2-thienylalanine (Thi); methionine sulfoxide (Mso); N(w)-nitroarginine (nArg); homolysine (hLys); phosphonomethylphenylalanine (pmPhe); phosphoserine (pSer); phosphothreonine (pThr); homoaspartic acid (hAsp); homoglutanic acid (hGlu); 1-aminocyclopent-(2 or 3)-ene-4 carboxylic acid; pipecolic acid (PA), azetidine-3-carboxylic acid (ACA); 1-aminocyclopentane-3-carboxylic acid; allylglycine (aGly); propargylglycine (pgGly); homoalanine (hAla); norvaline (nVal); homoleucine (hLeu), homovaline (hVal); homoisoleucine (hIle); homoarginine (hArg); N-acetyl lysine (AcLys); 2,4-diaminobutyric acid (Dbu); 2,3-diaminobutyric acid (Dab); N-methylvaline (MeVal); homocysteine (hCys); homoserine (hSer); hydroxyproline (Hyp) and homoproline (hPro). Additional non-encoded amino acids of which the polypeptides described herein may be comprised will be apparent to those of skill in the art (See e.g., the various amino acids provided in Fasman, CRC Practical Handbook of Biochemistry and Molecular Biology, CRC Press, Boca Raton, FL, pp. 3-70 [1989], and the references cited therein, all of which are incorporated by reference). These amino acids may be in either the L- or D-configuration.

[0198] Those of skill in the art will recognize that amino acids or residues bearing side chain protecting groups may also comprise the polypeptides described herein. Non-limiting examples of such protected amino acids, which in this case belong to the aromatic category, include (protecting groups listed in parentheses), but are not limited to: Arg(tos), Cys(methylbenzyl), Cys (nitropyridinesulfenyl), Glu(δ-benzylester), Gln(xanthyl), Asn(N-δ-xanthyl), His(bom), His(benzyl), His(tos), Lys(fmoc), Lys(tos), Ser(O-benzyl), Thr (O-benzyl) and Tyr(O-benzyl).

[0199] Non-encoding amino acids that are conformationally constrained of which the polypeptides described herein may be composed include, but are not limited to, N-methyl amino acids (L-configuration); 1-aminocyclopent-(2 or 3)-ene-4-carboxylic acid; pipecolic acid; azetidine-3-carboxylic acid; homoproline (hPro); and 1-aminocyclopentane-3-carboxylic acid.

[0200] In some embodiments, the engineered polypeptides can be in various forms, for example, such as an isolated preparation, as a substantially purified enzyme, whole cells transformed with gene(s) encoding the enzyme, and/or as cell extracts and/or lysates of such cells. The enzymes can be lyophilized, spray-dried, precipitated or be in the form of a crude paste, as further discussed below.

[0201] In some embodiments, the engineered polypeptides can be in the form of a biocatalytic composition. In some embodiments, the biocatalytic composition comprises (a) a means for conversion of a natural or modified NTP substrate to an NQP product by contact with a 3′O-kinase and (b) a suitable cofactor. The suitable cofactor may be another NTP or another suitable phosphate donor.

[0202] In some embodiments, the polypeptides described herein are provided in the form of kits. The enzymes in the kits may be present individually or as a plurality of enzymes. The kits can further include reagents for carrying out the enzymatic reactions, substrates for assessing the activity of enzymes, as well as reagents for detecting the products. The kits can also include reagent dispensers and instructions for use of the kits.

[0203] In some embodiments, the kits of the present invention include arrays comprising a plurality of different 3′O-kinase polypeptides at different addressable position, wherein the different polypeptides are different variants of a reference sequence each having at least one different improved enzyme property. In some embodiments, a plurality of polypeptides immobilized on solid supports are configured on an array at various locations, addressable for robotic delivery of reagents, or by detection methods and/or instruments. The array can be used to test a variety of substrate compounds for conversion by the polypeptides. Such arrays comprising a plurality of engineered polypeptides and methods of their use are known in the art (See e.g., WO2009/008908A2).

### Polynucleotides Encoding Engineered 3′O-Kinases, Expression Vectors and Host Cells

[0204] In another aspect, the present invention provides polynucleotides encoding the engineered 3′O-kinase polypeptides described herein. The polynucleotides may be operatively linked to one or more heterologous regulatory sequences that control gene expression to create a recombinant polynucleotide capable of expressing the polypeptide. Expression constructs containing a heterologous polynucleotide encoding the engineered 3′O-kinase are introduced into appropriate host cells to express the corresponding 3′O-kinase polypeptide.

[0205] As will be apparent to the skilled artisan, availability of a protein sequence and the knowledge of the codons corresponding to the various amino acids provide a description of all the polynucleotides capable of encoding the subject polypeptides. The degeneracy of the genetic code, where the same amino acids are encoded by alternative or synonymous codons, allows an extremely large number of nucleic acids to be made, all of which encode the improved 3′O-kinase enzymes. Thus, having knowledge of a particular amino acid sequence, those skilled in the art could make any number of different nucleic acids by simply modifying the sequence of one or more codons in a way which does not change the amino acid sequence of the protein. In this regard, the present invention specifically contemplates each and every possible variation of polynucleotides that could be made encoding the polypeptides described herein by selecting combinations based on the possible codon choices, and all such variations are to be considered specifically disclosed for any polypeptide described herein, including the amino acid sequences presented in Tables 13.1, 13.2, 13.3, 13.4, and 13.5, and disclosed in the sequence listing incorporated by reference herein as the even-numbered sequences in the range of SEQ ID NOs: 56-366, or 372-2122.

[0206] In various embodiments, the codons are preferably selected to fit the host cell in which the protein is being produced. For example, preferred codons used in bacteria are used to express the gene in bacteria; preferred codons used in yeast are used for expression in yeast; and preferred codons used in mammals are used for expression in mammalian cells. In some embodiments, all codons need not be replaced to optimize the codon usage of the 3′O-kinase since the natural sequence will comprise preferred codons and because use of preferred codons may not be required for all amino acid residues. Consequently, codon optimized polynucleotides encoding the 3′O-kinase enzymes may contain preferred codons at about 40%, 50%, 60%, 70%, 80%, or greater than 90% of codon positions of the full length coding region.

[0207] In some embodiments, the polynucleotide comprises a codon optimized nucleotide sequence encoding the 3′O-kinase polypeptide amino acid sequence, as represented by SEQ ID NO: 10. In some embodiments, the polynucleotide has a nucleic acid sequence comprising at least 80%, 85%, 90%, 91%, 92%, 93%, 94%, 95%, 96%, 97%, 98%, 99% or more identity to the codon optimized nucleic acid sequences encoding the even-numbered sequences in the range of SEQ ID NOs: 56-366, or 372-2122. In some embodiments, the polynucleotide has a nucleic acid sequence comprising at least 80%, 85%, 90%, 91%, 92%, 93%, 94%, 95%, 96%, 97%, 98%, 99% or more identity to the codon optimized nucleic acid sequences in the odd-numbered sequences in the range of SEQ ID NOs: 56-366, or 372-2122. In some embodiments, the codon optimized sequences of the odd-numbered sequences in the range of SEQ ID NOs: 55-365, or 371-2121, or 371-2121, enhance expression of the encoded 3′O-kinase, providing preparations of enzyme capable of converting substrate to product.

[0208] In some embodiments, the polynucleotides are capable of hybridizing under highly stringent conditions to a reference sequence selected from the odd-numbered sequences in SEQ ID NOs: 55-365, or 371-2121, or 371-2121, or a complement thereof, and encode a 3′O-kinase.

[0209] In some embodiments, as described above, the polynucleotide encodes an engineered 3′O-kinase polypeptide with improved properties as compared to SEQ ID NO: 10, wherein the polypeptide comprises an amino acid sequence having at least 80%, 85%, 86%, 87%, 88%, 89%, 90%, 91%, 92%, 93%, 94%, 95%, 96%, 97%, 98%, 99% or more identity to a reference sequence selected from SEQ ID NO: 10, and one or more residue differences as compared to SEQ ID NO: 10, wherein the sequence is selected from the even-numbered sequences in the range of SEQ ID NOs: 56-366, or 372-2122. In some embodiments, the reference amino acid sequence is selected from the even-numbered sequences in the range of SEQ ID NOs: 56-366, or 372-2122. In some embodiments, the reference amino acid sequence is SEQ ID NO: 10, while in some other embodiments, the reference sequence is SEQ ID NO: 14.

[0210] In some embodiments, the polynucleotide encodes a 3′O-kinase polypeptide capable of converting one or more substrates to product with improved properties as compared to SEQ ID NO: 10, wherein the polypeptide comprises an amino acid sequence having at least 80%, 85%, 86%, 87%, 88%, 89%, 90%, 91%, 92%, 93%, 94%, 95%, 96%, 97%, 98%, 99% or more sequence identity to reference sequence SEQ ID NO: 10.

[0211] In some embodiments, the polynucleotide encoding the engineered 3′O-kinase comprises a polynucleotide sequence selected from the odd-numbered sequences in the range of SEQ ID NOs: 55-365, or 371-2121, or 371-2121.

[0212] In some embodiments, the polynucleotides are capable of hybridizing under highly stringent conditions to a reference polynucleotide sequence selected from the odd-numbered sequences in the range of SEQ ID NOs: 55-365, or 371-2121, or 371-2121 or a complement thereof, and encode a 3′O-kinase polypeptide with one or more of the improved properties described herein. In some embodiments, the polynucleotide capable of hybridizing under highly stringent conditions encodes a 3′O-kinase comprising an amino acid sequence having at least 80%, 85%, 86%, 87%, 88%, 89%, 90%, 91%, 92%, 93%, 94%, 95%, 96%, 97%, 98%, 99% or more identity to SEQ ID NO: 10, that has an amino acid sequence comprising one or more residue differences as compared to SEQ ID NO: 10, as described above and in the Examples, below.

[0213] In some embodiments, the polynucleotide capable of hybridizing under highly stringent conditions encodes an engineered 3′O-kinase polypeptide with improved properties comprising an amino acid sequence having at least 80%, 85%, 86%, 87%, 88%, 89%, 90%, 91%, 92%, 93%, 94%, 95%, 96%, 97%, 98%, 99% or more identity to SEQ ID NO: 10. In some embodiments, the polynucleotides encode the polypeptides described herein but have at least about 80%, 85%, 86%, 87%, 88%, 89%, 90%, 91%, 92%, 93%, 94%, 95%, 96%, 97%, 98%, or 99% or more sequence identity at the nucleotide level to a reference polynucleotide encoding the engineered 3′O-kinase. In some embodiments, the reference polynucleotide sequence is selected from SEQ ID NOs: 55-365, or 371-2121.

[0214] In some embodiments, the polynucleotide capable of hybridizing under highly stringent conditions encodes an engineered 3′O-kinase polypeptide with improved properties comprising an amino acid sequence having at least 80%, 85%, 86%, 87%, 88%, 89%, 90%, 91%, 92%, 93%, 94%, 95%, 96%, 97%, 98%, 99% or more identity to SEQ ID NO: 10. In some embodiments, the polynucleotides encode the polypeptides described herein but have at least about 80%, 85%, 86%, 87%, 88%, 89%, 90%, 91%, 92%, 93%, 94%, 95%, 96%, 97%, 98%, or 99% or more sequence identity at the nucleotide level to a reference polynucleotide encoding the engineered 3′O-kinase. In some embodiments, the reference polynucleotide sequence is selected from SEQ ID NOs: 55-365, or 371-2121.

[0215] In some embodiments, an isolated polynucleotide encoding any of the engineered 3′O-kinase polypeptides provided herein is manipulated in a variety of ways to provide for expression of the polypeptide. In some embodiments, the polynucleotides encoding the polypeptides are provided as expression vectors where one or more control sequences is present to regulate the expression of the polynucleotides and/or polypeptides. Manipulation of the isolated polynucleotide prior to its insertion into a vector may be desirable or necessary depending on the expression vector. The techniques for modifying polynucleotides and nucleic acid sequences utilizing recombinant DNA methods are well known in the art.

[0216] In some embodiments, the control sequences include among other sequences, promoters, leader sequences, polyadenylation sequences, propeptide sequences, signal peptide sequences, and transcription terminators. As known in the art, suitable promoters can be selected based on the host cells used. For bacterial host cells, suitable promoters for directing transcription of the nucleic acid constructs of the present application, include, but are not limited to the promoters obtained from the E. coli lac operon, Streptomyces coelicolor agarase gene (dagA), Bacillus subtilis levansucrase gene (sacB), Bacillus licheniformis alpha-amylase gene (amyL), Bacillus stearothermophilus maltogenic amylase gene (amyM), Bacillus amyloliquefaciens alpha-amylase gene (amyQ), Bacillus lichenformis penicillinase gene (penP), Bacillus subtilis xylA and xylB genes, and prokaryotic beta-lactamase gene (See e.g., Villa-Kamaroff et al., Proc. Natl Acad. Sci. USA 75: 3727-3731 [1978]), as well as the tac promoter (See e.g., DeBoer et al., Proc. Natl Acad. Sci. USA 80: 21-25 [1983]). Exemplary promoters for filamentous fungal host cells, include promoters obtained from the genes for Aspergillus oryzae TAKA amylase, Rhizomucor miehei aspartic proteinase, Aspergillus niger neutral alpha-amylase, Aspergillus niger acid stable alpha-amylase, Aspergillus niger or Aspergillus awamori glucoamylase (glaA), Rhizomucor miehei lipase, Aspergillus oryzae alkaline protease, Aspergillus oryzae triose phosphate isomerase, Aspergillus nidulans acetamidase, and Fusarium oxysporum trypsin-like protease (See e.g., WO 96/00787), as well as the NA2-tpi promoter (a hybrid of the promoters from the genes for Aspergillus niger neutral alpha-amylase and Aspergillus oryzae triose phosphate isomerase), and mutant, truncated, and hybrid promoters thereof. Exemplary yeast cell promoters can be from the genes can be from the genes for Saccharomyces cerevisiae enolase (ENO-1), Saccharomyces cerevisiae galactokinase (GAL1), Saccharomyces cerevisiae alcohol dehydrogenase/glyceraldehyde-3-phosphate dehydrogenase (ADH2/GAP), and Saccharomyces cerevisiae 3-phosphoglycerate kinase. Other useful promoters for yeast host cells are known in the art (See e.g., Romanos et al., Yeast 8:423-488 [1992]).

[0217] In some embodiments, the control sequence is a suitable transcription terminator sequence, a sequence recognized by a host cell to terminate transcription. The terminator sequence is operably linked to the 3′ terminus of the nucleic acid sequence encoding the polypeptide. Any terminator which is functional in the host cell of choice finds use in the present invention. For example, exemplary transcription terminators for filamentous fungal host cells can be obtained from the genes for Aspergillus oryzae TAKA amylase, Aspergillus niger glucoamylase, Aspergillus nidulans anthranilate synthase, Aspergillus niger alpha-glucosidase, and Fusarium oxysporum trypsin-like protease. Exemplary terminators for yeast host cells can be obtained from the genes for Saccharomyces cerevisiae enolase, Saccharomyces cerevisiae cytochrome C (CYC1), and Saccharomyces cerevisiae glyceraldehyde-3-phosphate dehydrogenase. Other useful terminators for yeast host cells are known in the art (See e.g., Romanos et al., supra).

[0218] In some embodiments, the control sequence is a suitable leader sequence, a non-translated region of an mRNA that is important for translation by the host cell. The leader sequence is operably linked to the 5′ terminus of the nucleic acid sequence encoding the polypeptide. Any leader sequence that is functional in the host cell of choice may be used. Exemplary leaders for filamentous fungal host cells are obtained from the genes for Aspergillus oryzae TAKA amylase and Aspergillus nidulans triose phosphate isomerase. Suitable leaders for yeast host cells include, but are not limited to those obtained from the genes for Saccharomyces cerevisiae enolase (ENO-1), Saccharomyces cerevisiae 3-phosphoglycerate kinase, Saccharomyces cerevisiae alpha-factor, and Saccharomyces cerevisiae alcohol dehydrogenase/glyceraldehyde-3-phosphate dehydrogenase (ADH2/GAP). The control sequence may also be a polyadenylation sequence, a sequence operably linked to the 3′ terminus of the nucleic acid sequence and which, when transcribed, is recognized by the host cell as a signal to add polyadenosine residues to transcribed mRNA. Any polyadenylation sequence which is functional in the host cell of choice may be used in the present invention. Exemplary polyadenylation sequences for filamentous fungal host cells include, but are not limited to those from the genes for Aspergillus oryzae TAKA amylase, Aspergillus niger glucoamylase, Aspergillus nidulans anthranilate synthase, Fusarium oxysporum trypsin-like protease, and Aspergillus niger alpha-glucosidase. Useful polyadenylation sequences for yeast host cells are also known in the art (See e.g., Guo and Sherman, Mol. Cell. Bio., 15:5983-5990 [1995]).

[0219] In some embodiments, the control sequence is a signal peptide coding region that codes for an amino acid sequence linked to the amino terminus of a polypeptide and directs the encoded polypeptide into the cell's secretory pathway. The 5′ end of the coding sequence of the nucleic acid sequence may inherently contain a signal peptide coding region naturally linked in translation reading frame with the segment of the coding region that encodes the secreted polypeptide. Alternatively, the 5′ end of the coding sequence may contain a signal peptide coding region that is foreign to the coding sequence. Any signal peptide coding region that directs the expressed polypeptide into the secretory pathway of a host cell of choice finds use for expression of the engineered 3′O-kinase polypeptides provided herein. Effective signal peptide coding regions for bacterial host cells include, but are not limited to the signal peptide coding regions obtained from the genes for Bacillus NC1B 11837 maltogenic amylase, Bacillus stearothermophilus alpha-amylase, Bacillus licheniformis subtilisin, Bacillus licheniformis beta-lactamase, Bacillus stearothermophilus neutral proteases (nprT, nprS, nprM), and Bacillus subtilis prsA. Further signal peptides are known in the art (See e.g., Simonen and Palva, Microbiol. Rev., 57:109-137 [1993]). Effective signal peptide coding regions for filamentous fungal host cells include, but are not limited to the signal peptide coding regions obtained from the genes for Aspergillus oryzae TAKA amylase, Aspergillus niger neutral amylase, Aspergillus niger glucoamylase, Rhizomucor miehei aspartic proteinase, Humicola insolens cellulase, and Humicola lanuginosa lipase. Useful signal peptides for yeast host cells include, but are not limited to those from the genes for Saccharomyces cerevisiae alpha-factor and Saccharomyces cerevisiae invertase. In some embodiments, the control sequence is a propeptide coding region that codes for an amino acid sequence positioned at the amino terminus of a polypeptide. The resultant polypeptide is referred to as a “proenzyme,” “propolypeptide,” or “zymogen,” in some cases). A propolypeptide can be converted to a mature active polypeptide by catalytic or autocatalytic cleavage of the propeptide from the propolypeptide. The propeptide coding region includes, but is not limited to the genes for Bacillus subtilis alkaline protease (aprE), Bacillus subtilis neutral protease (nprT), Saccharomyces cerevisiae alpha-factor, Rhizomucor miehei aspartic proteinase, and Myceliophthora thermophila lactase (See e.g., WO 95/33836). Where both signal peptide and propeptide regions are present at the amino terminus of a polypeptide, the propeptide region is positioned next to the amino terminus of a polypeptide and the signal peptide region is positioned next to the amino terminus of the propeptide region.

[0220] In some embodiments, regulatory sequences are also utilized. These sequences facilitate the regulation of the expression of the polypeptide relative to the growth of the host cell. Examples of regulatory systems are those which cause the expression of the gene to be turned on or off in response to a chemical or physical stimulus, including the presence of a regulatory compound. In prokaryotic host cells, suitable regulatory sequences include, but are not limited to the lac, tac, and trp operator systems. In yeast host cells, suitable regulatory systems include, but are not limited to the ADH2 system or GAL1 system. In filamentous fungi, suitable regulatory sequences include, but are not limited to the TAKA alpha-amylase promoter, Aspergillus niger glucoamylase promoter, and Aspergillus oryzae glucoamylase promoter.

[0221] The present invention also provides recombinant expression vectors comprising a polynucleotide encoding an engineered 3′O-kinase polypeptide, and one or more expression regulating regions such as a promoter and a terminator, a replication origin, etc., depending on the type of hosts into which they are to be introduced. In some embodiments, the various nucleic acid and control sequences described above are combined together to produce a recombinant expression vector which includes one or more convenient restriction sites to allow for insertion or substitution of the nucleic acid sequence encoding the variant 3′O-kinase polypeptide at such sites. Alternatively, the polynucleotide sequence(s) of the present invention are expressed by inserting the polynucleotide sequence or a nucleic acid construct comprising the polynucleotide sequence into an appropriate vector for expression. In creating the expression vector, the coding sequence is located in the vector so that the coding sequence is operably linked with the appropriate control sequences for expression.

[0222] The recombinant expression vector may be any vector (e.g., a plasmid or virus), that can be conveniently subjected to recombinant DNA procedures and can result in the expression of the variant 3′O-kinase polynucleotide sequence. The choice of the vector will typically depend on the compatibility of the vector with the host cell into which the vector is to be introduced. The vectors may be linear or closed circular plasmids.

[0223] In some embodiments, the expression vector is an autonomously replicating vector (i.e., a vector that exists as an extra-chromosomal entity, the replication of which is independent of chromosomal replication, such as a plasmid, an extra-chromosomal element, a minichromosome, or an artificial chromosome). The vector may contain any means for assuring self-replication. In some alternative embodiments, the vector may be one which, when introduced into the host cell, is integrated into the genome and replicated together with the chromosome(s) into which it has been integrated. Furthermore, a single vector or plasmid or two or more vectors or plasmids which together contain the total DNA to be introduced into the genome of the host cell, or a transposon may be used.

[0224] In some embodiments, the expression vector preferably contains one or more selectable markers, which permit easy selection of transformed cells. A “selectable marker” is a gene the product of which provides for biocide or viral resistance, resistance to heavy metals, prototrophy to auxotrophy, and the like. Examples of bacterial selectable markers include, but are not limited to the dal genes from Bacillus subtilis or Bacillus lichenformis, or markers, which confer antibiotic resistance such as ampicillin, kanamycin, chloramphenicol or tetracycline resistance. Suitable markers for yeast host cells include, but are not limited to ADE2, HIS3, LEU2, LYS2, MET3, TRP1, and URA3. Selectable markers for use in a filamentous fungal host cell include, but are not limited to, amdS (acetamidase), argB (ornithine carbamoyltransferases), bar (phosphinothricin acetyltransferase), hph (hygromycin phosphotransferase), niaD (nitrate reductase), pyrG (orotidine-5′-phosphate decarboxylase), sC (sulfate adenyltransferase), and trpC (anthranilate synthase), as well as equivalents thereof. In another aspect, the present invention provides a host cell comprising a polynucleotide encoding at least one engineered 3′O-kinase polypeptide of the present invention, the polynucleotide being operatively linked to one or more control sequences for expression of the engineered 3′O-kinase enzyme(s) in the host cell. Host cells for use in expressing the polypeptides encoded by the expression vectors of the present invention are well known in the art and include but are not limited to, bacterial cells, such as E. coli, Vibriofluvialis, Streptomyces and Salmonella typhimurium cells; fungal cells, such as yeast cells (e.g., Saccharomyces cerevisiae and Pichia pastoris [ATCC Accession No. 201178]); insect cells such as Drosophila S2 and Spodoptera Sf9 cells; animal cells such as CHO, COS, BHK, 293, and Bowes melanoma cells; and plant cells. Exemplary host cells are Escherichia coli strains (e.g., W3110 (ΔfhuA) and BL21).

[0225] In some embodiments, the host cell strain comprises a knockout of one or more genes, in particular phosphatase genes. In some embodiments, the host cell comprises a knockout or single gene deletion of E. coli genes aphA, surE, phoA, and/or cpdB, as described below in the Examples. In some embodiments, the host cell comprising a knockout of one or more phosphatase genes has increased production of the product and/or decreased de-phosphorylation of the product or substrate.

[0226] Accordingly, in another aspect, the present invention provides methods for producing the engineered 3′O-kinase polypeptides, where the methods comprise culturing a host cell capable of expressing a polynucleotide encoding the engineered 3′O-kinase polypeptide under conditions suitable for expression of the polypeptide. In some embodiments, the methods further comprise the steps of isolating and/or purifying the 3′O-kinase polypeptides, as described herein.

[0227] Appropriate culture media and growth conditions for the above-described host cells are well known in the art. Polynucleotides for expression of the 3′O-kinase polypeptides may be introduced into cells by various methods known in the art. Techniques include, among others, electroporation, biolistic particle bombardment, liposome mediated transfection, calcium chloride transfection, and protoplast fusion.

[0228] The engineered 3′O-kinases with the properties disclosed herein can be obtained by subjecting the polynucleotide encoding the naturally occurring or engineered 3′O-kinase polypeptide to mutagenesis and/or directed evolution methods known in the art, and as described herein. An exemplary directed evolution technique is mutagenesis and/or DNA shuffling (See e.g., Stemmer, Proc. Natl. Acad. Sci. USA 91:10747-10751 [1994]; WO 95/22625; WO 97/0078; WO 97/35966; WO 98/27230; WO 00/42651; WO 01/75767 and U.S. Pat. No. 6,537,746). Other directed evolution procedures that can be used include, among others, staggered extension process (StEP), in vitro recombination (See e.g., Zhao et al., Nat. Biotechnol., 16:258-261 [1998]), mutagenic PCR (See e.g., Caldwell et al., PCR Methods Appl., 3:S136-S140 [1994]), and cassette mutagenesis (See e.g., Black et al., Proc. Natl. Acad. Sci. USA 93:3525-3529 [1996]).

[0229] For example, mutagenesis and directed evolution methods can be readily applied to polynucleotides to generate variant libraries that can be expressed, screened, and assayed. Mutagenesis and directed evolution methods are well known in the art (See e.g., U.S. Pat. Nos. 5,605,793, 5,811,238, 5,830,721, 5,834,252, 5,837,458, 5,928,905, 6,096,548, 6,117,679, 6,132,970, 6,165,793, 6,180,406, 6,251,674, 6,265,201, 6,277,638, 6,287,861, 6,287,862, 6,291,242, 6,297,053, 6,303,344, 6,309,883, 6,319,713, 6,319,714, 6,323,030, 6,326,204, 6,335,160, 6,335,198, 6,344,356, 6,352,859, 6,355,484, 6,358,740, 6,358,742, 6,365,377, 6,365,408, 6,368,861, 6,372,497, 6,337,186, 6,376,246, 6,379,964, 6,387,702, 6,391,552, 6,391,640, 6,395,547, 6,406,855, 6,406,910, 6,413,745, 6,413,774, 6,420,175, 6,423,542, 6,426,224, 6,436,675, 6,444,468, 6,455,253, 6,479,652, 6,482,647, 6,483,011, 6,484,105, 6,489,146, 6,500,617, 6,500,639, 6,506,602, 6,506,603, 6,518,065, 6,519,065, 6,521,453, 6,528,311, 6,537,746, 6,573,098, 6,576,467, 6,579,678, 6,586,182, 6,602,986, 6,605,430, 6,613,514, 6,653,072, 6,686,515, 6,703,240, 6,716,631, 6,825,001, 6,902,922, 6,917,882, 6,946,296, 6,961,664, 6,995,017, 7,024,312, 7,058,515, 7,105,297, 7,148,054, 7,220,566, 7,288,375, 7,384,387, 7,421,347, 7,430,477, 7,462,469, 7,534,564, 7,620,500, 7,620,502, 7,629,170, 7,702,464, 7,747,391, 7,747,393, 7,751,986, 7,776,598, 7,783,428, 7,795,030, 7,853,410, 7,868,138, 7,783,428, 7,873,477, 7,873,499, 7,904,249, 7,957,912, 7,981,614, 8,014,961, 8,029,988, 8,048,674, 8,058,001, 8,076,138, 8,108,150, 8,170,806, 8,224,580, 8,377,681, 8,383,346, 8,457,903, 8,504,498, 8,589,085, 8,762,066, 8,768,871, 9,593,326, and all related US, as well as PCT and non-US counterparts; Ling et al., Anal. Biochem., 254(2):157-78 [1997]; Dale et al., Meth. Mol. Biol., 57:369-74 [1996]; Smith, Ann. Rev. Genet., 19:423-462 [1985]; Botstein et al., Science, 229:1193-1201 [1985]; Carter, Biochem. J., 237:1-7 [1986]; Kramer et al., Cell, 38:879-887 [1984]; Wells et al., Gene, 34:315-323 [1985]; Minshull et al., Curr. Op. Chem. Biol., 3:284-290 [1999]; Christians et al., Nat. Biotechnol., 17:259-264 [1999]; Crameri et al., Nature, 391:288-291 [1998]; Crameri, et al., Nat. Biotechnol., 15:436-438 [1997]; Zhang et al., Proc. Nat. Acad. Sci. U.S.A., 94:4504-4509 [1997]; Crameri et al., Nat. Biotechnol., 14:315-319 [1996]; Stemmer, Nature, 370:389-391 [1994]; Stemmer, Proc. Nat. Acad. Sci. USA, 91:10747-10751 [1994]; WO 95/22625; WO 97/0078; WO 97/35966; WO 98/27230; WO 00/42651; WO 01/75767; and WO 2009/152336, all of which are incorporated herein by reference).

[0230] In some embodiments, the enzyme clones obtained following mutagenesis treatment are screened by subjecting the enzymes to a defined temperature (or other assay conditions, such as testing the enzyme's activity over a broad range of substrates) and measuring the amount of enzyme activity remaining after heat treatments or other assay conditions. Clones containing a polynucleotide encoding a 3′O-kinase polypeptide are then sequenced to identify the nucleotide sequence changes (if any), and used to express the enzyme in a host cell. Measuring enzyme activity from the expression libraries can be performed using any suitable method known in the art (e.g., standard biochemistry techniques, such as HPLC analysis).

[0231] In some embodiments, the clones obtained following mutagenesis treatment can be screened for engineered 3′O-kinases having one or more desired improved enzyme properties (e.g., improved regioselectivity). Measuring enzyme activity from the expression libraries can be performed using the standard biochemistry techniques, such as HPLC analysis, LC-MS analysis, RapidFire-MS analysis, and/or capillary electrophoresis analysis.

[0232] When the sequence of the engineered polypeptide is known, the polynucleotides encoding the enzyme can be prepared by standard solid-phase methods, according to known synthetic methods. In some embodiments, fragments of up to about 100 bases can be individually synthesized, then joined (e.g., by enzymatic or chemical ligation methods, or polymerase mediated methods) to form any desired continuous sequence. For example, polynucleotides and oligonucleotides encoding portions of the 3′O-kinase can be prepared by chemical synthesis as known in the art (e.g., the classical phosphoramidite method of Beaucage et al., Tet. Lett. 22:1859-69 [1981], or the method described by Matthes et al., EMBO J. 3:801-05 [1984]) as typically practiced in automated synthetic methods. According to the phosphoramidite method, oligonucleotides are synthesized (e.g., in an automatic DNA synthesizer), purified, annealed, ligated and cloned in appropriate vectors. In addition, essentially any nucleic acid can be obtained from any of a variety of commercial sources. In some embodiments, additional variations can be created by synthesizing oligonucleotides containing deletions, insertions, and/or substitutions, and combining the oligonucleotides in various permutations to create engineered 3′O-kinases with improved properties.

[0233] Accordingly, in some embodiments, a method for preparing the engineered 3′O-kinase polypeptide comprises: (a) synthesizing a polynucleotide encoding a polypeptide comprising an amino acid sequence having at least about 80%, 85%, 86%, 87%, 88%, 89%, 90%, 91%, 92%, 93%, 94%, 95%, 96%, 97%, 98%, or 99% or more sequence identity to an amino acid sequence selected from the even-numbered sequences of SEQ ID NOs: 56-366, or 372-2122, and having one or more residue differences as compared to SEQ ID NO: 10; and (b) expressing the 3′O-kinase polypeptide encoded by the polynucleotide.

[0234] In some embodiments of the method, the polynucleotide encodes an engineered 3′O-kinase that has optionally one or several (e.g., up to 3, 4, 5, or up to 10) amino acid residue deletions, insertions and/or substitutions. In some embodiments, the amino acid sequence has optionally 1-2, 1-3, 1-4, 1-5, 1-6, 1-7, 1-8, 1-9, 1-10, 1-15, 1-20, 1-21, 1-22, 1-23, 1-24, 1-25, 1-30, 1-35, 1-40, 1-45, 1-50, 1-75, 1-100, or 1-150 amino acid residue deletions, insertions and/or substitutions. In some embodiments, the amino acid sequence has optionally around 1, 2, 3, 4, 5, 6, 7, 8, 9, 10, 11, 12, 13, 14, 15, 16, 17, 18, 19, 20, 21, 22, 23, 24, 25, 30, 30, 35, 40, 45, 50, 55, 60, 65, 70, 80, 90, 100, 110, 120, 130, 140, or 150 amino acid residue deletions, insertions and/or substitutions. In some embodiments, the substitutions can be conservative or non-conservative substitutions.

[0235] In some embodiments, any of the engineered 3′O-kinase enzymes expressed in a host cell can be recovered from the cells and/or the culture medium using any one or more of the well-known techniques for protein purification, including, among others, lysozyme treatment, sonication, filtration, salting-out, ultra-centrifugation, and chromatography. Suitable solutions for lysing and the high efficiency extraction of proteins from bacteria, such as E. coli, are commercially available (e.g., CelLytic B™, Sigma-Aldrich, St. Louis MO).

[0236] Chromatographic techniques for isolation of the 3′O-kinase polypeptide include, among others, reverse phase chromatography high performance liquid chromatography, ion exchange chromatography, gel electrophoresis, and affinity chromatography. Conditions for purifying a particular enzyme will depend, in part, on factors such as net charge, hydrophobicity, hydrophilicity, molecular weight, molecular shape, etc., and will be apparent to those having skill in the art.

[0237] In some embodiments, affinity techniques may be used to isolate the improved 3′O-kinase enzymes. For affinity chromatography purification, any antibody which specifically binds the 3′O-kinase polypeptide may be used. For the production of antibodies, various host animals, including but not limited to rabbits, mice, rats, etc., may be immunized by injection with a 3′O-kinase polypeptide, or a fragment thereof. The 3′O-kinase polypeptide or fragment may be attached to a suitable carrier, such as BSA, by means of a side chain functional group or linkers attached to a side chain functional group. In some embodiments, the affinity purification can use a specific ligand bound by the 3′O-kinase or dye affinity column (See e.g., EP0641862; Stellwagen, “Dye Affinity Chromatography,” In Current Protocols in Protein Science, Unit 9.2-9.2.16 [2001]).

### Methods of Using the Engineered 3′O-Kinase Enzymes and NQP Synthesis Cascade

[0238] New methods to synthesize natural and modified NQPs are necessary to enable production of oligonucleotides on the scale required for modern synthetic biology applications in a more sustainable manner.

[0239] The present disclosure provides methods to synthesize natural and modified NQPs using one or more enzymes. In some embodiments, the present disclosure provides enzymes for the conversion of an NTP to an NTP with a phosphate group at the 3′ position of the sugar (NQP), as depicted in Schemes 1, 3, and 4, above.

[0240] In some embodiments, the present disclosure provides enzymes for the conversion of a nucleoside to an NMP via addition of a phosphate group to the 5′ position of the sugar. In some embodiments, the present invention provides enzymes for the conversion of an NMP to an NDP. In some embodiments, the present disclosure provides enzymes for the conversion of an NDP to an NTP. In some embodiments, the present disclosure provides enzymes for the conversion of an NTP to an NQP. In some embodiments, the present disclosure provides a one-pot method for conversion of nucleosides to NQPs. In some embodiments, the present disclosure provides a one-pot method, two step method for conversion of nucleosides to NQPs.

[0241] In any of the above embodiments, the nucleosides, NMPs, NDPs, NTPs, NQPs, p4A, and other byproduct species may be natural or may comprise one or more modifications. In any of the above embodiments, the nucleosides, NMPs, NDPs, NTPs, NQPs, p4A, and other byproduct species may comprise ribonucleosides, deoxyribonucleosides, dideoxynucleosides, or modified nucleosides. In any of the above embodiments, the nucleosides, NMPs, NDPs, NTPs, NQPs, p4A, and other byproduct species may comprise one or more modifications to the sugar. In any of the above embodiments, the nucleosides, NMPs, NDPs, NTPs, NQPs, p4A, and other byproduct species may comprise one or more modifications to the nucleobase. In any of the above embodiments, the NMPs, NDPs, NTPs, NQPs, p4A, and other byproduct species may comprise an α-thiophosphate or dithiophosphate or other modification to the 5′ phosphate chain. Any of these modifications may be present in any combination in the 3′O-kinase substrate or may be added after or during conversion to the 3′O-kinase product.

[0242] In some embodiments, the 2′-R group of the sugar comprises H, OH, OCH₃, OCH₂CH₂OCH₃, F, CO₂R′ (where R′ is any alkyl or aryl), or another atom or chemical group. In some embodiments, the sugar may have other modifications at other positions, such as locked nucleotides or constrained ethyl nucleotides, as is known in the art. In some embodiments, “locked nucleoside” or “locked nucleotide” refers to nucleoside or nucleotide, respectively, in which the ribose moiety is modified with a bridge connecting the 2′ oxygen and 4′ carbon (see, e.g., Obika et al., Tetrahedron Letters, 1997, 38(50):8735-8738; Orum et al., Current Pharmaceutical Design, 2008, 14(11):1138-1142). Typically, the bridge is a methylene bridge. In some embodiments, the 3′-phosphate group of the NQP may act as a removable blocking group or protecting group that may be selectively unblocked or removed to allow further modifications, reactions, or incorporation of the NQP into a growing oligonucleotide chain during template-dependent or template-independent oligonucleotide synthesis.

[0243] In some embodiments, the nucleobase may be a uridine, thymine, cytosine, adenine, guanine or another nucleobase known to those skilled in the art. In some embodiments, the nucleobase of the nucleoside, NMP, NTP, NDP, NTP, NQP, p4A, or byproduct species may have modifications. Various modified nucleobases are known to those skilled in the art, including but not limited to the following: 5-methylcytosine, pyridin-4-one, pyridin-2-one, phenyl, pseudouracil, 3-methyl uracil, dihydrouridine, naphthyl, aminophenyl, 5-alkylcytidines, 5-alkyluridines, 5-halouridines, 6-azapyrimidines, 6-alkylpyrimidines, propyne, quesosine, 2-thiouridine, 4-thiouridine, 4-acetyltidine, 5-(carboxyhydroxymethyl)uridine, 5-carboxymethylaminomethyl-2-thiouridine, 5-carboxymethylaminomethyluridine, -D-galactosylqueosine, 1-methyladenosine, 1-methylinosine, 2,2-dimethylguanosine, 3-methylcytidine, 2-methyladenosine, 2-methylguanosine, N6-methyladenosine, 7-methylguanosine, 5-methoxyaminomethy 1-2-thiouridine, 5-methylaminomethy luridine, 5-methylcarbon ylmethyluridine, 5-methyloxyuridine, 5-methyl-2-thiouridine, 2-methylthio-N6-isopentenyladenosine, -D-mannosylqueosine, uridine-5-oxyacetic acid, 2-thiocytidine, N1-methyl-adenine, N6-methyl-adenine, 8′-azido-adenine, N,N-dimethy 1-adenosine, aminoally 1-adenosine, 5′-methyl-urdine, pseudouridine, N1-methyl-pseudouridine, 5′-hydroxy-methyl-uridine, 2′-thio-uridine, 4′-thio-uridine, hypoxanthine, xanthine, 5′-methyl-cytidine, 5′-hydroxy-methyl-cytidine, 6′-thio-guanine, and N7-methyl-guanine. In some embodiments, the nucleobase modification is a removable tag, a cleavable linker, or a radio, photo, or chemical sensor. In some embodiments, the nucleobase modification is a functional element that may be used for isolation, purification, detection, protection, prevention of hydrolysis or degradation, chemical transformation, or to enable further or sequential modifications.

[0244] In some embodiments, the NMP, NTP, NDP, NTP, NQP, p4A, or byproduct species comprises one or more modifications to the 5′ phosphate chain. The 5′ phosphate chain may comprise one, two, or three phosphates or no phosphates may be present. The 5′ phosphate chain may also comprise one or more phosphate groups with modifications (e.g. an α-thiophosphate or dithiophosphate).

[0245] In particular, the engineered 3′O-kinase polypeptides of the present disclosure have been engineered for efficient synthesis of NQPs, in the processes depicted in Scheme 1, 3, and 4, above. A variety of suitable reaction conditions are known to those skilled in the art, including the reaction conditions detailed in the Examples. A variety of methods of generating NQPs are possible using the enzymes, substrates, and cofactors described herein. These embodiments are intended to be non-limiting; the present disclosure contemplates methods comprising every combination of enzymes, substrates, and cofactors described herein.

[0246] In some embodiments, the present disclosure provides a method of producing an NTP with a phosphate group at the 3′ position of the sugar or NQP, the method comprising (i) providing a 3′O-kinase enzyme, and (ii) contacting the 3′O-kinase enzyme with an NTP under suitable reaction conditions, such that an NTP with a phosphate group at the 3′ position of the sugar or NQP is produced. In certain embodiments, the method comprises (i) providing an engineered 3′O-kinase comprising one or more amino acid residue substitutions as compared to a wild type or reference polypeptide, and (ii) contacting the engineered 3′O-kinase enzyme with an NTP under suitable reaction conditions, such that an NTP with a phosphate group at the 3′ position of the sugar or an NQP is produced. In certain embodiments, the method comprises (i) providing a 3′O-kinase enzyme, and (ii) contacting the 3′O-kinase enzyme with an NTP with one or modifications under suitable reaction conditions, such that an NTP with a phosphate group at the 3′ position of the sugar or NQP with one or more modifications is produced. In certain embodiments, the method comprises (i) providing an engineered 3′O-kinase comprising one or more amino acid residue substitutions as compared to a wild type or reference polypeptide, and (ii) contacting the engineered 3′O-kinase enzyme with an NTP, optionally, with one or modifications, under suitable reaction conditions, such that an NTP with a phosphate group at the 3′ position of the sugar or NQP, optionally, with one or modifications, is produced. In any of the above embodiments, the method may further comprise providing a source of phosphate, and, optionally, one or more phosphate recycling enzymes including but not limited to pyruvate oxidase and/or acetate kinase. In any of the above embodiments, the method may further comprise providing more than one 3′O-kinase in step (i). In any of the above embodiments, the method may further comprise a 3′O-kinase comprising increased activity, increased activity on non-natural substrates, increased selectivity, increased substrate promiscuity, decreased product inhibition, and/or decreased byproduct formation, as compared to a wild-type or reference 3′O-kinase. In any of the above embodiments, the method may further comprise a phosphate donor NTP that is the same type of NTP as the substrate NTP. In any of the above embodiments, the method may further comprise a phosphate donor NTP that is a different type of NTP than the substrate NTP.

[0247] In certain embodiments, the present disclosure provides a method of producing an NTP with a phosphate group at the 3′ position of the sugar or NQP, the method comprising (i) providing an engineered 3′O-kinase comprising at least 60%, 70%, 80%, 90%, or 95% sequence identity to one or more of the even-numbered sequences between SEQ ID NO: 56-366, or 372-2122, and (ii) contacting the engineered 3′O-kinase enzyme with an NTP, optionally, with one or modifications, under suitable reaction conditions, such that an NTP with a phosphate group at the 3′ position of the sugar or NQP, optionally, with one or modifications, is produced. In some embodiments, the method comprises (i) providing an engineered 3′O-kinase comprising at least 60%, 70%, 80%, 90%, or 95% sequence identity to one or more of the even-numbered sequences between SEQ ID NO: 56-366, or 372-2122, and (ii) contacting the engineered 3′O-kinase enzyme with an NTP, optionally, with one or modifications, under suitable reaction conditions, such that an NTP with a phosphate group at the 3′ position of the sugar or NQP, optionally, with one or modifications, is produced, wherein said engineered 3′O-kinase converts said NTP to NQP with a conversion rate that is at least 1.5 fold, 2 fold, 5 fold, 10 fold or more increased, as compared to a wild type or reference 3′O-kinase. In certain embodiments, the method comprises (i) providing an engineered 3′O-kinase comprising at least 60%, 70%, 80%, 90%, or 95% sequence identity to one or more of the even-numbered sequences between SEQ ID NO: 56-366, or 372-2122, and (ii) contacting the engineered 3′O-kinase enzyme with an NTP, optionally, with one or modifications, under suitable reaction conditions, such that an NTP with a phosphate group at the 3′ position of the sugar or NQP, optionally, with one or modifications, is produced, wherein said engineered 3′O-kinase converts said NTP to NQP with a selectivity for NQP over NPP that is at least 1.1 fold, 1.2 fold, 1.5 fold, 2 fold, 5 fold or more increased, as compared to a wild type or reference 3′O-kinase. In any of the above embodiments, the method may further comprise providing a source of phosphate, and, optionally, one or more phosphate recycling enzymes including but not limited to pyruvate oxidase and/or acetate kinase. In any of the above embodiments, the method may further comprise providing more than one 3′O-kinase in step (i). In any of the above embodiments, the method may further comprise a 3′O-kinase comprising increased activity, increased activity on non-natural substrates, increased selectivity, increased substrate promiscuity, decreased product inhibition, and/or decreased byproduct formation, as compared to a wild-type or reference 3′O-kinase. In any of the above embodiments, the method may further comprise a phosphate donor NTP that is the same type of NTP as the substrate NTP. In any of the above embodiments, the method may further comprise a phosphate donor NTP that is a different type of NTP than the substrate NTP. In any of the above embodiments, the 3′O-kinase may comprise any of the polypeptides encoded by the even-numbered sequences from SEQ ID NO: 56-366, or 372-2122.

[0248] In some embodiments, the present disclosure provides a one-pot method for conversion of nucleosides to NQPs, as depicted in Scheme 3, above. In some embodiments, the one-pot method for conversion of nucleosides to NQPs occurs in one step.

[0249] In some embodiments, the present disclosure provides a method of producing an NTP with a phosphate group at the 3′ position of the sugar or NQP, the method comprising (i) providing a 5′O-kinase enzyme, a nucleoside monophosphate kinase enzyme, an acetate kinase enzyme, and a 3′O-kinase enzyme, and (ii) contacting the 5′O-kinase enzyme, the nucleoside monophosphate kinase enzyme, the acetate kinase enzyme, and the 3′O-kinase enzyme with a nucleoside under suitable reaction conditions, such that an NTP with a phosphate group at the 3′ position of the sugar or NQP is produced. In certain embodiments, the method comprises (i) providing a 5′O-kinase enzyme, a nucleoside monophosphate kinase enzyme, an acetate kinase enzyme, and an engineered 3′O-kinase comprising one or more amino acid residue substitutions as compared to a wild type or reference polypeptide, and (ii) contacting the 5′O-kinase enzyme, the nucleoside monophosphate kinase enzyme, the acetate kinase enzyme, and the engineered 3′O-kinase enzyme with a nucleoside under suitable reaction conditions, such that an NTP with a phosphate group at the 3′ position of the sugar or NQP is produced. In certain embodiments, the method comprises (i) providing a 5′O-kinase enzyme, a nucleoside monophosphate kinase enzyme, an acetate kinase enzyme, and a 3′O-kinase enzyme and (ii) contacting the 5′O-kinase enzyme, the nucleoside monophosphate kinase enzyme, the acetate kinase enzyme and the 3′O-kinase enzyme with a nucleoside with one or modifications under suitable reaction conditions, such that an NTP with a phosphate group at the 3′ position of the sugar or NQP with one or more modifications is produced. In certain embodiments, the method comprises (i) providing a 5′O-kinase enzyme, a nucleoside monophosphate kinase enzyme, an acetate kinase enzyme, and an engineered 3′O-kinase comprising one or more amino acid residue substitutions as compared to a wild type or reference polypeptide, and (ii) contacting the 5′O-kinase enzyme, the nucleoside monophosphate kinase enzyme, the acetate kinase enzyme, and the engineered 3′O-kinase enzyme with a nucleoside with one or modifications under suitable reaction conditions, such that an NTP with a phosphate group at the 3′ position of the sugar or NQP with one or more modifications is produced. In certain embodiments, the method comprises (i) providing a 5′O-kinase enzyme, a nucleoside monophosphate kinase enzyme, an acetate kinase enzyme, and an engineered 3′O-kinase comprising at least 60%, 70%, 80%, 90%, or 95% sequence identity to one or more of the even-numbered sequences between SEQ ID NO: 56-366, or 372-2122, and (ii) contacting the 5′O-kinase enzyme, the nucleoside monophosphate kinase enzyme, the acetate kinase enzyme, and the engineered 3′O-kinase enzyme with a nucleoside with one or modifications under suitable reaction conditions, such that an NTP with a phosphate group at the 3′ position of the sugar or NQP with one or more modifications is produced. In any of the above embodiments, the method may further comprise providing a source of phosphate, and, optionally, one or more phosphate recycling enzymes, including but not limited to pyruvate oxidase and/or acetate kinase. In any of the above embodiments, the method may further comprise providing more than one 3′O-kinase in step (i). In any of the above embodiments, the method may further comprise a 3′O-kinase comprising increased activity, increased activity on non-natural substrates, increased selectivity, increased substrate promiscuity, decreased product inhibition, and/or decreased byproduct formation, as compared to a wild-type or reference 3′O-kinase. In any of the above embodiments, the method may further comprise a phosphate donor NTP that is the same type of NTP as the substrate NTP. In any of the above embodiments, the method may further comprise a phosphate donor NTP that is a different type of NTP than the substrate NTP. In any of the above embodiments, the 3′O-kinase may comprise any of the polypeptides encoded by the even-numbered sequences from SEQ ID NO: 56-366, or 372-2122.

[0250] In some embodiments, the present disclosure provides a one-pot method for conversion of nucleosides to NQPs. In some embodiments, the one-pot method for conversion of nucleosides to NQPs occurs in more than one step. In some embodiments, the one-pot method for conversion of nucleosides to NQPs occurs in two steps, wherein the second step is depicted in Scheme 1, above, and the first step is depicted in Scheme 4, above.

[0251] In some embodiments, the present disclosure provides a method of producing an NTP with a phosphate group at the 3′ position of the sugar or NQP, the method comprising (i) providing a 5′O-kinase enzyme, a nucleoside monophosphate kinase enzyme, and an acetate kinase enzyme; (ii) contacting the 5′O-kinase enzyme, the nucleoside monophosphate kinase enzyme, and the acetate kinase enzyme with a nucleoside under suitable reaction conditions, such that an NTP is produced; iii) providing a 3′O-kinase enzyme; and (iv) contacting the 3′O-kinase enzyme with the NTP under suitable reaction conditions, such that an NTP with a phosphate group at the 3′ position of the sugar or NQP is produced. In certain embodiments, the method comprises (i) providing a 5′O-kinase enzyme, a nucleoside monophosphate kinase enzyme, and an acetate kinase enzyme; (ii) contacting the 5′O-kinase enzyme, the nucleoside monophosphate kinase enzyme, and the acetate kinase enzyme with a nucleoside under suitable reaction conditions, such that an NTP is produced; iii) providing an engineered 3′O-kinase comprising one or more amino acid residue substitutions as compared to a wild type or reference polypeptide; and (iv) contacting the engineered 3′O-kinase enzyme with the NTP under suitable reaction conditions, such that an NTP with a phosphate group at the 3′ position of the sugar or NQP is produced. In certain embodiments, the method comprises (i) providing a 5′O-kinase enzyme, a nucleoside monophosphate kinase enzyme, and an acetate kinase enzyme; (ii) contacting the 5′O-kinase enzyme, the nucleoside monophosphate kinase enzyme, and the acetate kinase enzyme with a nucleoside with one or more modifications under suitable reaction conditions, such that an NTP with one or more modifications is produced; iii) providing a 3′O-kinase enzyme; and (iv) contacting the 3′O-kinase enzyme with the NTP with one or more modifications under suitable reaction conditions, such that an NTP with a phosphate group at the 3′ position of the sugar or NQP with one or more modifications is produced. In certain embodiments, the method comprises (i) providing a 5′O-kinase enzyme, a nucleoside monophosphate kinase enzyme, and an acetate kinase enzyme; (ii) contacting the 5′O-kinase enzyme, the nucleoside monophosphate kinase enzyme, and the acetate kinase enzyme with a nucleoside with one or more modifications under suitable reaction conditions, such that an NTP with one or more modifications is produced; iii) providing an engineered 3′O-kinase comprising one or more amino acid residue substitutions as compared to a wild type or reference polypeptide; and (iv) contacting the engineered 3′O-kinase enzyme with the NTP with one or more modifications under suitable reaction conditions, such that an NTP with a phosphate group at the 3′ position of the sugar or NQP with one or more modifications is produced. In any of the above embodiments, the method may further comprise providing a source of phosphate, and, optionally, one or more phosphate recycling enzymes, including but not limited to pyruvate oxidase and/or acetate kinase. In any of the above embodiments, the method may further comprise a 3′O-kinase comprising increased activity, increased activity on non-natural substrates, increased selectivity, increased substrate promiscuity, decreased product inhibition, and/or decreased byproduct formation, as compared to a wild-type or reference 3′O-kinase. In any of the above embodiments, the method may further comprise providing more than one 3′O-kinase in step (i). In any of the above embodiments, the method may further comprise a phosphate donor NTP that is the same type of NTP as the substrate NTP. In any of the above embodiments, the method may further comprise a phosphate donor NTP that is a different type of NTP than the substrate NTP.

[0252] In some embodiments, the present disclosure provides a method of producing an NTP with a phosphate group at the 3′ position of the sugar or NQP, the method comprising (i) providing a 5′O-kinase enzyme, a nucleoside monophosphate kinase enzyme, and an acetate kinase enzyme; (ii) contacting the 5′O-kinase enzyme, the nucleoside monophosphate kinase enzyme, and the acetate kinase enzyme with a nucleoside, optionally, with one or modifications, under suitable reaction conditions, such that an NTP, optionally, with one or modifications, is produced; iii) providing an engineered 3′O-kinase comprising at least 60%, 70%, 80%, 90%, or 95% sequence identity to one or more of the even-numbered sequences between SEQ ID NO: 56-366, or 372-2122; and (iv) contacting the engineered 3′O-kinase enzyme with the NTP, optionally, with one or modifications, under suitable reaction conditions, such that an NTP with a phosphate group at the 3′ position of the sugar or NQP, optionally, with one or modifications, is produced. In some embodiments, the method comprises (i) providing a 5′O-kinase enzyme, a nucleoside monophosphate kinase enzyme, and an acetate kinase enzyme; (ii) contacting the 5′O-kinase enzyme, the nucleoside monophosphate kinase enzyme, and the acetate kinase enzyme with a nucleoside, optionally, with one or modifications, under suitable reaction conditions, such that an NTP, optionally, with one or modifications, is produced; iii) providing an engineered 3′O-kinase comprising at least 60%, 70%, 80%, 90%, or 95% sequence identity to one or more of the even-numbered sequences between SEQ ID NO: 56-366, or 372-2122; and (iv) contacting the engineered 3′O-kinase enzyme with the NTP, optionally, with one or modifications, under suitable reaction conditions, such that an NTP with a phosphate group at the 3′ position of the sugar or NQP, optionally, with one or modifications, is produced, wherein said engineered 3′O-kinase converts said NTP to NQP with a conversion rate that is at least 1.5 fold, 2 fold, 5 fold, 10 fold or more increased, as compared to a wild type or reference 3′O-kinase. In some embodiments, the method comprises (i) providing a 5′O-kinase enzyme, a nucleoside monophosphate kinase enzyme, and an acetate kinase enzyme; (ii) contacting the 5′O-kinase enzyme, the nucleoside monophosphate kinase enzyme, and the acetate kinase enzyme with a nucleoside, optionally, with one or modifications, under suitable reaction conditions, such that an NTP, optionally, with one or modifications, is produced; iii) providing an engineered 3′O-kinase comprising at least 60%, 70%, 80%, 90%, or 95% sequence identity to one or more of the even-numbered sequences between SEQ ID NO: 56-366, or 372-2122; and (iv) contacting the engineered 3′O-kinase enzyme with the NTP, optionally, with one or modifications, under suitable reaction conditions, such that an NTP with a phosphate group at the 3′ position of the sugar or NQP, optionally, with one or modifications, is produced, wherein said engineered 3′O-kinase converts said NTP to NQP with a selectivity for NQP over NPP that is at least 1.1 fold, 1.2 fold, 1.5 fold, 2 fold, 5 fold or more increased, as compared to a wild type or reference 3′O-kinase. In any of the above embodiments, the method may further comprise providing a source of phosphate, and, optionally, one or more phosphate recycling enzymes, including but not limited to pyruvate oxidase and/or acetate kinase. In any of the above embodiments, the method may further comprise a 3′O-kinase comprising increased activity, increased activity on non-natural substrates, increased selectivity, increased substrate promiscuity, decreased product inhibition, and/or decreased byproduct formation, as compared to a wild-type or reference 3′O-kinase. In any of the above embodiments, the method may further comprise providing more than one 3′O-kinase in step (i). In any of the above embodiments, the method may further comprise a phosphate donor NTP that is the same type of NTP as the substrate NTP. In any of the above embodiments, the method may further comprise a phosphate donor NTP that is a different type of NTP than the substrate NTP. In any of the above embodiments, the 3′O-kinase may comprise any of the polypeptides encoded by the even-numbered sequences from SEQ ID NO: 56-366, or 372-2122.

[0253] In any of the disclosed embodiments, the nucleosides, NMPs, NDPs, NTPs, NQPs, p4A and other byproduct species may be natural or may comprise one or more modifications. In any of the disclosed embodiments, the nucleosides, NMPs, NDPs, NTPs, NQPs, p4A and other byproduct species may comprise ribonucleosides, deoxyribonucleosides, dideoxynucleosides, or modified nucleosides. In any of the disclosed embodiments, the nucleosides, NMPs, NDPs, NTPs, NQPs, p4A and other byproduct species may comprise one or more modifications to the sugar. In any of the disclosed embodiments, the nucleosides, NMPs, NDPs, NTPs, NQPs, p4A and other byproduct species may comprise one or more modifications to the nucleobase. In any of the disclosed embodiments, the nucleosides, NMPs, NDPs, NTPs, NQPs, p4A and other byproduct species may comprise an α-thiophosphate or dithiophosphate or other modification to the 5′ phosphate chain.

[0254] In some embodiments, the enzymes described herein find use in processes for conversion of one or more suitable substrates to a product.

[0255] In some embodiments, the engineered 3′O-kinase polypeptides disclosed herein can be used in a process for the conversion of a natural or modified nucleoside, NMP, NDP, or NTP substrate to a product comprising a natural or modified nucleoside, NMP, NDP, or NTP with a phosphate group at the 3′ position of the sugar.

[0256] In the embodiments provided herein and illustrated in the Examples, various ranges of suitable reaction conditions that can be used in the processes, include but are not limited to, substrate loading, co-substrate loading, pH, temperature, buffer, solvent system, cofactor, polypeptide loading, and reaction time. Further suitable reaction conditions for carrying out the process for biocatalytic conversion of substrate compounds to product compounds using the enzymes described herein can be readily optimized in view of the guidance provided herein by routine experimentation that includes, but is not limited to, contacting the enzymes and one or more substrate compounds under experimental reaction conditions of concentration, pH, temperature, and solvent conditions, and detecting the product compound. The reaction conditions described herein are examples only. The present disclosure contemplates any suitable reaction conditions that may find use in the methods described herein.

[0257] The substrate compound in the reaction mixtures can be varied, taking into consideration, for example, the desired amount of product compound, the effect of each substrate concentration on enzyme activity, stability of enzyme under reaction conditions, and the percent conversion of each substrate to product. In some embodiments, the suitable reaction conditions comprise a substrate compound loading of at least about 0.1 uM to 1 uM, 1 uM to 2 uM, 2 uM to 3 uM, 3 uM to 5 uM, 5 uM to 10 uM, or 10 uM or greater. In some embodiments, the suitable reaction conditions comprise a substrate compound loading of at least about 0.5 to about 25 g/L, 1 to about 25 g/L, 5 to about 25 g/L, about 10 to about 25 g/L, or 20 to about 25 g/L. In some embodiments, the suitable reaction conditions comprise a substrate compound loading of at least about 0.5 g/L, at least about 1 g/L, at least about 5 g/L, at least about 10 g/L, at least about 15 g/L, at least about 20 g/L, or at least about 30 g/L, or even greater.

[0258] In carrying out the synthesis processes described herein, the engineered polypeptides may be added to the reaction mixture in the form of a purified enzyme, partially purified enzyme, whole cells transformed with gene(s) encoding the enzyme, as cell extracts and/or lysates of such cells, and/or as an enzyme immobilized on a solid support. Whole cells transformed with gene(s) encoding the enzyme(s) or cell extracts, lysates thereof, and isolated enzymes may be employed in a variety of different forms, including solid (e.g., lyophilized, spray-dried, and the like) or semisolid (e.g., a crude paste). The cell extracts or cell lysates may be partially purified by precipitation (ammonium sulfate, polyethyleneimine, heat treatment or the like, followed by a desalting procedure prior to lyophilization (e.g., ultrafiltration, dialysis, etc.). Any of the enzyme preparations (including whole cell preparations) may be stabilized by crosslinking using known crosslinking agents, such as, for example, glutaraldehyde or immobilization to a solid phase (e.g., Eupergit C, and the like).

[0259] The gene(s) encoding the polypeptides can be transformed into host cell separately or together into the same host cell. For example, in some embodiments one set of host cells can be transformed with gene(s) encoding one polypeptide and another set can be transformed with gene(s) encoding another polypeptide. Both sets of transformed cells can be utilized together in the reaction mixture in the form of whole cells, or in the form of lysates or extracts derived therefrom. In other embodiments, a host cell can be transformed with gene(s) encoding multiple polypeptides. In some embodiments the polypeptides can be expressed in the form of secreted polypeptides and the culture medium containing the secreted polypeptides can be used for the synthesis reaction.

[0260] In some embodiments, the improved activity of the engineered 3′O-kinase polypeptides disclosed herein provides for processes wherein higher percentage conversion can be achieved with lower concentrations of the engineered polypeptide. In some embodiments of the process, the suitable reaction conditions comprise an engineered polypeptide amount of about 1% (w/w), 2% (w/w), 5% (w/w), 10% (w/w), 20% (w/w), 30% (w/w), 40% (w/w), 50% (w/w), 75% (w/w), 100% (w/w) or more of substrate compound loading.

[0261] In some embodiments, the engineered polypeptide is present at a molar ratio of engineered polypeptide to substrate of about 50 to 1, 25 to 1, 10 to 1, 5 to 1, 1 to 1, 1 to 5, 1 to 10, 1 to 25 or 1 to 50. In some embodiments, the engineered polypeptide is present at a molar ratio of engineered polypeptide to substrate from a range of about 50 to 1 to a range of about 1 to 50.

[0262] In some embodiments, the engineered polypeptide is present at about 0.01 g/L to about 50 g/L; about 0.01 to about 0.1 g/L; about 0.05 g/L to about 50 g/L; about 0.1 g/L to about 40 g/L; about 1 g/L to about 40 g/L; about 2 g/L to about 40 g/L; about 5 g/L to about 40 g/L; about 5 g/L to about 30 g/L; about 0.1 g/L to about 10 g/L; about 0.5 g/L to about 10 g/L; about 1 g/L to about 10 g/L; about 0.1 g/L to about 5 g/L; about 0.5 g/L to about 5 g/L; or about 0.1 g/L to about 2 g/L. In some embodiments, the 3′O-kinase polypeptide is present at about 0.01 g/L, 0.05 g/L, 0.1 g/L, 0.2 g/L, 0.5 g/L, 1, 2 g/L, 5 g/L, 10 g/L, 15 g/L, 20 g/L, 25 g/L, 30 g/L, 35 g/L, 40 g/L, or 50 g/L.

[0263] In some embodiments, the suitable reaction conditions comprise a phosphate donor. In some embodiments, the phosphate donor is an NTP. In some embodiments, the phosphate donor is acetyl phosphate. In some embodiments, the phosphate donor is present at concentrations of about 1 to 500 uM; about 50 to 400 uM; about 100 to 300 uM; or about 200 to 300 uM. In some embodiments, the phosphate donor is regenerated or created by an enzyme, so that a lower concentration of phosphate donor is used.

[0264] During the course of the reaction, the pH of the reaction mixture may change. The pH of the reaction mixture may be maintained at a desired pH or within a desired pH range. This may be done by the addition of an acid or a base, before and/or during the course of the reaction. Alternatively, the pH may be controlled by using a buffer. Accordingly, in some embodiments, the reaction condition comprises a buffer. Suitable buffers to maintain desired pH ranges are known in the art and include, by way of example and not limitation, borate, potassium phosphate, 2-(N-morpholino)ethanesulfonic acid (MES), 3-(N-morpholino)propanesulfonic acid (MOPS), acetate, triethanolamine, and 2-amino-2-hydroxymethyl-propane-1,3-diol (Tris), and the like. In some embodiments, the reaction conditions comprise water as a suitable solvent with no buffer present.

[0265] In the embodiments of the process, the reaction conditions comprise a suitable pH. The desired pH or desired pH range can be maintained by use of an acid or base, an appropriate buffer, or a combination of buffering and acid or base addition. The pH of the reaction mixture can be controlled before and/or during the course of the reaction. In some embodiments, the suitable reaction conditions comprise a solution pH from about 4 to about 10, pH from about 5 to about 10, pH from about 5 to about 9, pH from about 6 to about 9, pH from about 6 to about 8. In some embodiments, the reaction conditions comprise a solution pH of about 4, 4.5, 5, 5.5, 6, 6.5, 7, 7.5, 8, 8.5, 9, 9.5, or 10.

[0266] In the embodiments of the processes herein, a suitable temperature is used for the reaction conditions, for example, taking into consideration the increase in reaction rate at higher temperatures, and the activity of the enzyme during the reaction time period. Accordingly, in some embodiments, the suitable reaction conditions comprise a temperature of about 10° C. to about 95° C., about 10° C. to about 75° C., about 15° C. to about 95° C., about 20° C. to about 95° C., about 20° C. to about 65° C., about 25° C. to about 70° C., or about 50° C. to about 70° C. In some embodiments, the suitable reaction conditions comprise a temperature of about 10° C., 15° C., 20° C., 25° C., 30° C., 35° C., 40° C., 45° C., 50° C., 55° C., 60° C., 65° C., 70° C., 75° C., 80° C., 85° C., 90° C. or 95° C. In some embodiments, the temperature during the enzymatic reaction can be maintained at a specific temperature throughout the course of the reaction. In some embodiments, the temperature during the enzymatic reaction can be adjusted over a temperature profile during the course of the reaction.

[0267] In some embodiments, the processes of the invention are carried out in a solvent. Suitable solvents include water, aqueous buffer solutions, organic solvents, polymeric solvents, and/or co-solvent systems, which generally comprise aqueous solvents, organic solvents and/or polymeric solvents. The aqueous solvent (water or aqueous co-solvent system) may be pH-buffered or unbuffered. In some embodiments, the processes using the engineered 3′O-kinase polypeptides can be carried out in an aqueous co-solvent system comprising an organic solvent (e.g., ethanol, isopropanol (IPA), dimethyl sulfoxide (DMSO), dimethylformamide (DMF) ethyl acetate, butyl acetate, 1-octanol, heptane, octane, methyl t butyl ether (MTBE), toluene, and the like), ionic or polar solvents (e.g., 1-ethyl 4 methylimidazolium tetrafluoroborate, 1-butyl-3-methylimidazolium tetrafluoroborate, 1-butyl 3 methylimidazolium hexafluorophosphate, glycerol, polyethylene glycol, and the like). In some embodiments, the co-solvent can be a polar solvent, such as a polyol, dimethylsulfoxide (DMSO), or lower alcohol. The non-aqueous co-solvent component of an aqueous co-solvent system may be miscible with the aqueous component, providing a single liquid phase, or may be partly miscible or immiscible with the aqueous component, providing two liquid phases. Exemplary aqueous co-solvent systems can comprise water and one or more co-solvents selected from an organic solvent, polar solvent, and polyol solvent. In general, the co-solvent component of an aqueous co-solvent system is chosen such that it does not adversely inactivate the enzymes under the reaction conditions. Appropriate co-solvent systems can be readily identified by measuring the enzymatic activity of the specified enzymes with a defined substrate of interest in the candidate solvent system, utilizing an enzyme activity assay, such as those described herein.

[0268] In some embodiments of the process, the suitable reaction conditions comprise an aqueous co-solvent, where the co-solvent comprises DMSO at about 1% to about 50% (v/v), about 1 to about 40% (v/v), about 2% to about 40% (v/v), about 5% to about 30% (v/v), about 10% to about 30% (v/v), or about 10% to about 20% (v/v). In some embodiments of the process, the suitable reaction conditions can comprise an aqueous co-solvent comprising ethanol at about 1% (v/v), about 5% (v/v), about 10% (v/v), about 15% (v/v), about 20% (v/v), about 25% (v/v), about 30% (v/v), about 35% (v/v), about 40% (v/v), about 45% (v/v), or about 50% (v/v).

[0269] In some embodiments, the reaction conditions comprise a surfactant for stabilizing or enhancing the reaction. Surfactants can comprise non-ionic, cationic, anionic and/or amphiphilic surfactants. Exemplary surfactants, include by way of example and not limitation, nonyl phenoxypolyethoxylethanol (NP40), TRITON™ X-100 polyethylene glycol tert-octylphenyl ether, polyoxyethylene-stearylamine, cetyltrimethylammonium bromide, sodium oleylamidosulfate, polyoxyethylene-sorbitanmonostearate, hexadecyldimethylamine, etc. Any surfactant that may stabilize or enhance the reaction may be employed. The concentration of the surfactant to be employed in the reaction may be generally from 0.1 to 50 mg/ml, particularly from 1 to 20 mg/ml.

[0270] In some embodiments, the reaction conditions include an antifoam agent, which aids in reducing or preventing formation of foam in the reaction solution, such as when the reaction solutions are mixed or sparged. Anti-foam agents include non-polar oils (e.g., minerals, silicones, etc.), polar oils (e.g., fatty acids, alkyl amines, alkyl amides, alkyl sulfates, etc.), and hydrophobic (e.g., treated silica, polypropylene, etc.), some of which also function as surfactants. Exemplary anti-foam agents include Y-30® (Dow Corning), poly-glycol copolymers, oxy/ethoxylated alcohols, and polydimethylsiloxanes. In some embodiments, the anti-foam can be present at about 0.001% (v/v) to about 5% (v/v), about 0.01% (v/v) to about 5% (v/v), about 0.1% (v/v) to about 5% (v/v), or about 0.1% (v/v) to about 2% (v/v). In some embodiments, the anti-foam agent can be present at about 0.001% (v/v), about 0.01% (v/v), about 0.1% (v/v), about 0.5% (v/v), about 1% (v/v), about 2% (v/v), about 3% (v/v), about 4% (v/v), or about 5% (v/v) or more as desirable to promote the reaction.

[0271] The quantities of reactants used in the synthesis reaction will generally vary depending on the quantities of product desired, and concomitantly the amount of substrates employed. Those having ordinary skill in the art will readily understand how to vary these quantities to tailor them to the desired level of productivity and scale of production.

[0272] In some embodiments, the order of addition of reactants is not critical. The reactants may be added together at the same time to a solvent (e.g., monophasic solvent, biphasic aqueous co-solvent system, and the like), or alternatively, some of the reactants may be added separately, and some together at different time points. For example, the cofactor, co-substrate and substrate may be added first to the solvent.

[0273] The solid reactants (e.g., enzyme, salts, etc.) may be provided to the reaction in a variety of different forms, including powder (e.g., lyophilized, spray dried, and the like), solution, emulsion, suspension, and the like. The reactants can be readily lyophilized or spray dried using methods and equipment that are known to those having ordinary skill in the art. For example, the protein solution can be frozen at −80° C. in small aliquots, then added to a pre-chilled lyophilization chamber, followed by the application of a vacuum.

[0274] For improved mixing efficiency when an aqueous co-solvent system is used, the polypeptide(s), and co-substrate may be added and mixed into the aqueous phase first. The substrate may be added and mixed in, followed by the organic phase or the substrate may be dissolved in the organic phase and mixed in. Alternatively, the substrate may be premixed in the organic phase, prior to addition to the aqueous phase.

[0275] The processes of the present invention are generally allowed to proceed until further conversion of substrate to product does not change significantly with reaction time (e.g., less than 10% of substrate being converted, or less than 5% of substrate being converted). In some embodiments, the reaction is allowed to proceed until there is complete or near complete conversion of substrate to product. Transformation of substrate to product can be monitored using known methods by detecting substrate and/or product, with or without derivatization. Suitable analytical methods include gas chromatography, HPLC, MS, and the like. In some embodiments, after suitable conversion to product, the reactants are separated from the product and additional reactants are added.

[0276] Any of the processes disclosed herein using the polypeptides for the preparation of products can be carried out under a range of suitable reaction conditions, including but not limited to ranges of substrates, temperature, pH, solvent system, substrate loading, polypeptide loading, cofactor loading, and reaction time. In one example, the suitable reaction conditions for the conversion of an NTP to an NQP comprise: (a) substrate loading of about 1-200 mM NTP; (b) about 0.01 g/L to 5 g/L engineered 3′O-kinase polypeptide; (c) 1-100 mM MgCl₂; (e) 5 to 100 mM tris-HCl buffer; (f) 10-100 mM LiKAcPO₄⁻; (g) pH at 5-9; and (h) temperature of about 15° C. to 70° C. In one example, the suitable reaction conditions for the conversion of an NTP to an NQP comprise: (a) substrate loading of about 50 mM NTP; (b) about 0.01 g/L to 5 g/L engineered 3′O-kinase polypeptide; (c) 10 mM MgCl₂; (e) 50 mM tris-HCl buffer; (f) 10 mM LiKAcPO₄⁻; (g) pH 7.5; and (h) temperature of about 25° C. In some embodiments, the enzyme loading is between 1-30% w/w. In some embodiments, additional reaction components or additional techniques carried out to supplement the reaction conditions. These can include taking measures to stabilize or prevent inactivation of the enzyme, reduce product inhibition, shift reaction equilibrium to formation of the desired product.

[0277] Accordingly, it is further contemplated that any of the methods of using the polypeptides of the present invention can be carried out using the polypeptides bound or immobilized on a solid support.

[0278] Methods of enzyme immobilization are well-known in the art. The engineered polypeptides can be bound non-covalently or covalently. Various methods for conjugation and immobilization of enzymes to solid supports (e.g., resins, membranes, beads, glass, etc.) are well known in the art (See e.g., Yi et al., Proc. Biochem., 42(5): 895-898 [2007]; Martin et al., Appl. Microbiol. Biotechnol., 76(4): 843-851 [2007]; Koszelewski et al., J. Mol. Cat. B: Enzymatic, 63: 39-44 [2010]; Truppo et al., Org. Proc. Res. Dev., published online: dx.doi.org/10.1021/op200157c; Hermanson, Bioconjugate Techniques, 2^{nd} ed., Academic Press, Cambridge, MA [2008]; Mateo et al., Biotechnol. Prog., 18(3):629-34 [2002]; and “Bioconjugation Protocols: Strategies and Methods,” In Methods in Molecular Biology, Niemeyer (ed.), Humana Press, New York, NY [2004]; the disclosures of each which are incorporated by reference herein). Solid supports useful for immobilizing the engineered 3′O-kinase of the present invention include but are not limited to beads or resins comprising polymethacrylate with epoxide functional groups, polymethacrylate with amino epoxide functional groups, styrene/DVB copolymer or polymethacrylate with octadecyl functional groups. Exemplary solid supports useful for immobilizing the engineered 3′O-kinase polypeptides of the present invention include, but are not limited to, EnginZyme (including, EziG-1, EziG-1, and EziG-3), chitosan beads, Eupergit C, and SEPABEADs (Mitsubishi) (including EC-EP, EC-HFA/S, EXA252, EXE119 and EXE120).

[0279] In further embodiments, any of the above described processes for the conversion of one or more substrate compounds to product compound can further comprise one or more steps selected from: extraction; isolation; purification; and crystallization of product compound. Methods, techniques, and protocols for extracting, isolating, purifying, and/or crystallizing the product from biocatalytic reaction mixtures produced by the above disclosed processes are known to the ordinary artisan and/or accessed through routine experimentation. Additionally, illustrative methods are provided in the Examples below.

[0280] Various features and embodiments of the invention are illustrated in the following representative examples, which are intended to be illustrative, and not limiting.

### EXAMPLES

[0281] The following Examples, including experiments and results achieved, are provided for illustrative purposes only and are not to be construed as limiting the present invention. Indeed, there are various suitable sources for many of the reagents and equipment described below. It is not intended that the present invention be limited to any particular source for any reagent or equipment item.

[0282] In the experimental disclosure below, the following abbreviations apply: M (molar); mM (millimolar), uM and μM (micromolar); nM (nanomolar); mol (moles); gm and g (gram); mg (milligrams); ug and μg (micrograms); L and 1 (liter); ml and mL (milliliter); cm (centimeters); mm (millimeters); um and μιη(micrometers); sec. (seconds); min(s) (minute(s)); h(s) and hr(s) (hour(s)); U (units); MW (molecular weight); rpm (rotations per minute); psi and PSI (pounds per square inch); ° C. (degrees Celius); RT and rt (room temperature); CV (coefficient of variability); CAM and cam (chloramphenicol); PMBS (polymyxin B sulfate); IPTG (isopropyl β-D-1-thiogalactopyranoside); LB (lysogeny broth); TB (terrific broth); SFP (shake flask powder); CDS (coding sequence); DNA (deoxyribonucleic acid); RNA (ribonucleic acid); nt (nucleotide; polynucleotide); aa (amino acid; polypeptide); E. coli W3110 (commonly used laboratory E. coli strain, available from the Coli Genetic Stock Center [CGSC], New Haven, CT); HTP (high throughput); HPLC (high pressure liquid chromatography); HPLC-UV (HPLC-Ultraviolet Visible Detector); 1H NMR (proton nuclear magnetic resonance spectroscopy); FIOPC (fold improvements over positive control); Sigma and Sigma-Aldrich (Sigma-Aldrich, St. Louis, MO; Difco (Difco Laboratories, BD Diagnostic Systems, Detroit, MI); Microfluidics (Microfluidics, Westwood, MA); Life Technologies (Life Technologies, a part of Fisher Scientific, Waltham, MA); Amresco (Amresco, LLC, Solon, OH); Carbosynth (Carbosynth, Ltd., Berkshire, UK); Varian (Varian Medical Systems, Palo Alto, CA); Agilent (Agilent Technologies, Inc., Santa Clara, CA); Infors (Infors USA Inc., Annapolis Junction, MD); and Thermotron (Thermotron, Inc., Holland, MI).

### Example 1

### Gene Acquisition and Expression of Wild-Type 3OK Variants

[0283] Synthetic genes encoding an N-terminal or C-terminal 6-histidine tagged version of multiple wild-type (WT) 3′O-Kinase (30K) enzymes were cloned into the pCK110900 vector system (See e.g., U.S. Pat. No. 9,714,437, which is hereby incorporated by reference in its entirety) and subsequently expressed in an E. coli strain derived from W3110.

[0284] Cells transformed with the 3OK expression constructs were grown at shake-flask scale using either IPTG induction (SEQ ID NOs: 3 and 5) or auto-induction (SEQ ID NOs: 1, 7-15), as described in Example 7, (Methods 1 and 2 respectively). Cells were then lysed, purified, and dialyzed into storage buffer (20 mM Tris-HCl, pH 7.4, 100 mM KCl, 0.1 mM EDTA, and 50% glycerol). After overnight dialysis, protein samples were removed, and 3OK concentrations were measured by absorption at 280 nm using a NanoDrop™ 1000 spectrophotometer. Soluble protein concentrations are summarized in Table 1.1 below, showing a fold improvement in soluble protein production following shake-flask purification relative to the 3′O-kinase from Thermosynechococcus vestitus (SEQ ID NO: 2).

TABLE 1.1
Soluble Enzyme Production of Variants Relative to SEQ ID NO: 2

| SEQ ID NO: | | FIOP Soluble Enzyme Production |
|---|---|---|
| (nt/aa) | Source organism of 3OK gene sequence | (Relative to SEQ ID NO: 2) |
| 3/4 | E coli W3110 | +++ |
| 5/6 | E coli W3110 | +++ |
| 7/8 | Thermomonas hydrothermalis | +++ |
| 9/10 | Geobacillus stearothermophilus | ++ |
| 11/12 | Aquifex aeolicus | ++ |
| 13/14 | Thermotoga sp. RQ7 | ++ |
| 15/16 | Caldibacillus thermoamylovorans | + |
| 1/2 | Thermosynechococcus vestitus | + |

Levels of increased soluble enzyme production were determined relative to the reference polypeptide of SEQ ID NO: 2 and defined as follows:
“+” 1.00 to 6.40,
“++” >6.40,
“+++” >21.60

### Example 2

### Gene Acquisition and Expression of Adenylate Kinase Variants

[0285] Synthetic genes encoding N-terminal 6-histidine tagged versions of wild-type (WT) and evolved adenylate kinase enzymes (AdK) were cloned into the pCK900 vector system (See e.g., U.S. Pat. No. 9,714,437, which is hereby incorporated by reference in its entirety) and subsequently expressed in an E. coli strain derived from W3110TKO.

[0286] Cells transformed with the adenylate kinase expression construct were grown at shake-flask scale, as described in Example 7, (Method 1). Cells were then lysed, purified, and dialyzed into storage buffer (20 mM Tris-HCl, pH 7.4, 100 mM KCl, 0.1 mM EDTA, and 50% glycerol), as described in Example 7. After overnight dialysis, protein samples were removed, and adenylate kinase enzyme concentrations were measured by absorption at 280 nm using a NanoDrop™ 1000 spectrophotometer. Soluble protein concentrations are summarized in Table 2.1 below.

TABLE 2.1
Soluble Enzyme Production of Variants Relative to SEQ ID NO: 20

| SEQ ID NO: | | FIOP Soluble Enzyme Production |
|---|---|---|
| (nt/aa) | Source organism of AdK gene sequence | (Relative to SEQ ID NO: 20) |
| 21/22 | Saccharomyces cerevisiae | +++ |
| 23/24 | Saccharomyces cerevisiae | +++ |
| 25/26 | Thermotoga neapolitana | ++ |
| 27/28 | Escherichia coli | ++ |
| 19/20 | Geobacillus stearothermophilus | + |

Levels of increased soluble enzyme production were determined relative to the reference polypeptide of SEQ ID NO: 20 and defined as follows:
“+” 1.00 to 1.10,
“++” >1.10,
“+++” >2.10

### Example 3

### Gene Acquisition and Expression of Guanylate Kinase Variants

[0287] Synthetic genes encoding N-terminal 6-histidine tagged versions of an evolved guanylate kinase enzyme (GuK) were cloned into the pCK900 vector system (See e.g., U.S. Pat. No. 9,714,437, which is hereby incorporated by reference in its entirety) and subsequently expressed in an E. coli strain derived from W3110TKO.

[0288] Cells transformed with the guanylate kinase expression construct were grown at shake-flask scale, as described in Example 7, (Method 1). Cells were then lysed, purified, and dialyzed into storage buffer (20 mM Tris-HCl, pH 7.4, 100 mM KCl, 0.1 mM EDTA, and 50% glycerol), as described in Example 7. After overnight dialysis, protein samples were removed, and guanylate kinase enzyme concentrations were measured by absorption at 280 nm using a NanoDrop™ 1000 spectrophotometer. Soluble protein concentrations are summarized in Table 3.1 below.

TABLE 3.1
Soluble Enzyme Production of guanylate kinase variant

| SEQ ID NO: | | Soluble Enzyme Concentration |
|---|---|---|
| (nt/aa) | Source organism of GuK gene sequence | After Purification [mg/mL] |
| 17/18 | Branchiostoma floridae | + |

Levels of increased soluble enzyme production are defined as follows:
“+” >12

### Example 4

### Gene Acquisition and Expression of Pyruvate Oxidase

[0289] Synthetic genes encoding N-terminal 6-histidine tagged versions of wild-type (WT) pyruvate oxidase (POX) were cloned into the pCK900 vector system (See e.g., U.S. Pat. No. 9,714,437, which is hereby incorporated by reference in its entirety) and subsequently expressed in an E. coli strain derived from W3110TKO.

[0290] Cells transformed with the pyruvate oxidase expression construct were grown at shake-flask scale and the expressed enzymes were collected as lyophilized powders as described in Example 7, (Method 3). The relative expression levels of these enzymes were determined by gel electrophoresis. The relative expression levels as measured by gel electrophoresis are shown in Table 4.1 below.

[0291] Cells transformed with the pyruvate oxidase expression construct were grown at shake-flask scale, as described in Example 7, (Method 1). Cells were then lysed, purified, and dialyzed into storage buffer (20 mM Tris-HCl, pH 7.4, 100 mM KCl, 0.1 mM EDTA, and 50% glycerol), as described in Example 7. After overnight dialysis, protein samples were removed, and pyruvate kinase enzyme concentrations were measured by absorption at 280 nm using a NanoDrop™ 1000 spectrophotometer. Soluble protein concentrations are summarized in Table 4.1 below.

TABLE 4.1
Enzyme Production of pyruvate oxidase variants

| SEQ ID NO: | Source organism of pyruvate oxidase gene | Relative Enzyme expression |
|---|---|---|
| (nt/aa) | sequence | level |
| 31/32 | Bifidobacterium mongoliense | +++ |
| 33/34 | Alkalibacterium subtropicum | ++ |
| 35/36 | Pisciglobus halotolerans | ++ |
| 37/38 | Jeotgalibaca sp PTS2502 | ++ |
| 39/40 | Vagococcus fluvialis | ++ |
| 41/42 | Candidatus Gracilibacteria bacterium | ++ |
| 43/44 | Bavariicoccus seileri | ++ |
| 45/46 | Bifidobacterium aquikefiri | + |
| 47/48 | Aerococcus urinae | + |
| 29/30 | Aerococcus suis | + |

Levels of increased enzyme production were qualitatively determined and defined as follows:
“+” low expression,
“++” moderate expression,
“+++” high expression

### Example 5

### Gene Acquisition and Expression of Adenosine Kinase Variants

[0292] Synthetic genes encoding N-terminal 6-histidine tagged versions of three wild-type (WT) adenosine kinase enzymes (AdoK) were cloned into the pCK900 vector system (See e.g., U.S. Pat. No. 9,714,437, which is hereby incorporated by reference in its entirety) and subsequently expressed in an E. coli strain derived from W3110TKO.

[0293] Cells transformed with the adenosine kinase (AdoK) expression constructs were grown at shake-flask scale using IPTG induction, as described in Example 7 (Method 1). The cells were then lysed, purified, and dialyzed into storage buffer (20 mM Tris-HCl, pH 7.4, 100 mM KCl, 0.1 mM EDTA, and 50% glycerol). After overnight dialysis, protein samples were removed, and adenosine kinase enzyme concentrations were measured by absorption at 280 nm using a NanoDrop™ 1000 spectrophotometer. Soluble protein concentrations are summarized in Table 5.1 below.

TABLE 5.1
Soluble Enzyme Production of Adenosine Kinase Variants

| SEQ ID NO: | Source organism of adenosine kinase gene | FIOP Soluble Enzyme Production |
|---|---|---|
| (nt/aa) | sequence | (Relative to SEQ ID NO: 50) |
| 51/52 | Thermostaphylospora chromogena | ++ |
| 53/54 | Carbonactinospora thermoautotrophica | ++ |
| 49/50 | Xanthomonas campestris | + |

“Levels of increased soluble enzyme production were determined relative to the reference polypeptide of SEQ ID NO: 50 and defined as follows:
““+”” 1.00 to 1.19,
“++” >1.19

### Example 6

### 3OK Expression and Purification in High Throughput (HTP)

### High Throughput (HTP) Growth of 3OK Enzyme and Variants

[0294] Transformed E. coli cells were selected by plating onto LB agar plates containing 1% glucose and 30 μg/ml chloramphenicol. After overnight incubation at 37° C., colonies were placed into the wells of 96-well shallow flat bottom NUNC™ (Thermo-Scientific) plates filled with 180 μl/well LB medium supplemented with 1% glucose and 30 μg/ml chloramphenicol. The cultures were allowed to grow overnight for 18-20 hours in a shaker (200 rpm, 30° C., and 85% relative humidity; Kuhner). Overnight growth samples (20 μL) were transferred into Costar 96-well deep plates filled with 380 μL of Terrific Broth supplemented with 30 μg/ml chloramphenicol. The plates were incubated for 120 minutes in a shaker (250 rpm, 30° C., and 85% relative humidity; Kuhner) until the OD₆₀₀ reached between 0.4-0.8. The cells were then induced with 40 μL of 10 mM IPTG in sterile water and incubated overnight for 18-20 hours in a shaker (250 rpm, 30° C., and 85% relative humidity; Kuhner). The cells were pelleted (4,000 rpm for 20 min), the supernatants were discarded, and the cells were frozen at −80° C. prior to analysis.

[0295] For lysis, 200 μL lysis buffer containing 50 mM Tris-HCl buffer, pH 7.5, and 0.1 g/L lysozyme were added to the cell pellet in each well. The cells were shaken vigorously at room temperature for 10 minutes on a bench top shaker. A 100-uL aliquot of the re-suspended cells was transferred to a 96-well format 200 μL BioRad PCR plate, then briefly spun-down prior to 1-hour heat treatment at the temperature indicated, typically 48-60° C. Following heat-treatment, the cell debris was pelleted by centrifugation (4,000 rpm, 4° C., 20 min), and clear supernatants were then used in biocatalytic reactions to determine their activity levels.

### Example 7

### Shake Flask Expression and Purification Procedure

### Shake Flask Expression

### Method 1: Shake Flask Expression Using IPTG Induction

[0296] Selected HTP cultures, grown as described in Example 6, were plated onto LB agar plates with 1% glucose and 30 μg/mL chloramphenicol and grown overnight at 37° C. A single colony from each culture was transferred to 5 mL of LB broth with 1% glucose and 30 μg/mL chloramphenicol. The cultures were grown for 20 h at 30° C., 250 rpm, and subcultured at a dilution of approximately 1:50 into 250 mL of Terrific Broth with 30 μg/mL of chloramphenicol, to a final OD₆₀₀ of about 0.05. The cultures were incubated for approximately 195 min at 30° C., 250 rpm, to an OD₆₀₀ of about 0.6, and then induced with the addition of IPTG at a final concentration of 1 mM. The induced cultures were incubated for 20 h at 30° C., 250 rpm. Following this incubation period, the cultures were centrifuged at 4,000 rpm for 10 min. The culture supernatant was discarded, and the pellets were resuspended in 35 mL of 20 mM triethanolamine, pH 7.5. This cell suspension was chilled in an ice bath and lysed using a Microfluidizer cell disruptor (Microfluidics M-110L). The crude lysate was pelleted by centrifugation (11,000 rpm for 60 min at 4° C.), and the supernatant was then filtered through a 0.2 μm PES membrane to further clarify the lysate.

### Method 2: Shake Flask Expression Using Auto-Induction

[0297] Selected HTP cultures, grown as described in Example 6, were plated onto LB agar plates with 1% glucose and 30 μg/mL chloramphenicol and grown overnight at 37° C. A single colony from each culture was transferred to 160 mL of Terrific Broth containing 0.075% glucose, 0.03% lactose, and 30 μg/mL of chloramphenicol. The cultures were grown for 20 h at 30° C. and 250 rpm. Following this incubation period, the cultures were centrifuged at 4,000 rpm for 10 min. The culture supernatant was discarded, and the pellets were resuspended in 35 mL of 20 mM triethanolamine, pH 7.5. This cell suspension was chilled in an ice bath and lysed using a Microfluidizer cell disruptor (Microfluidics M-110L). The crude lysate was pelleted by centrifugation (11,000 rpm for 60 min at 4° C.), and the supernatant was then filtered through a 0.2 μm PES membrane to further clarify the lysate.

### Method 3: Shake-Flask Expression Using IPTG Induction and Collection of Enzyme as Shake Flask Powder

[0298] Selected HTP cultures, grown as described in Example 6, were plated onto LB agar plates with 1% glucose and 30 μg/mL chloramphenicol and grown overnight at 37° C. A single colony from each culture was transferred to 5 mL of LB broth with 1% glucose and 30 μg/mL chloramphenicol. The cultures were grown for 20 h at 30° C., 250 rpm, and subcultured at a dilution of approximately 1:50 into 250 mL of Terrific Broth with 30 μg/mL of chloramphenicol, to a final OD₆₀₀ of about 0.05. The cultures were incubated for approximately 195 min at 30° C., 250 rpm, to an OD₆₀₀ of about 0.6, and then induced with the addition of IPTG at a final concentration of 1 mM. The induced cultures were incubated for 20 h at 30° C., 250 rpm. Following this incubation period, the cultures were centrifuged at 4,000 rpm for 10 min. The culture supernatant was discarded, and the pellets were resuspended in 35 mL of 20 mM triethanolamine, pH 7.5. This cell suspension was chilled in an ice bath and lysed using a Microfluidizer cell disruptor (Microfluidics M-110L). The crude lysate was pelleted by centrifugation (11,000 rpm for 60 min at 4° C.). The supernatant was collected in petri dishes and frozen at −80° C. The water was then removed under reduced pressure with a lyophilizer. The resultant powder was then collected and stored at −20° C.

Purification of from Shake Flask Lysates

[0299] Lysates were supplemented with 1/10^{th} volume of SF elution buffer (50 mM Tris-HCl, 500 mM NaCl, 250 mM imidazole, 0.02% v/v Triton X-100 reagent). Lysates were then purified using an AKTA Pure purification system and a 5 mL HisTrap FF column (GE Healthcare) using the run parameters in Table 7.1. The SF wash buffer comprised 50 mM Tris-HCl, 300 mM NaCl, 20 mM imidazole, 0.02% v/v Triton X-100 reagent.

TABLE 7.1
Purification Parameters

| Parameter | Volume | |
|---|---|---|
| Column volume | 5 | mL |
| Flow rate | 8 | mL/min |
| Pressure limit | 0.3 | mPa |
| Sample volume | 35 | mL |
| Equilibration volume | 5 column volumes (CV) = 25 mL | |
| Wash Unbound volume | 20 CV = 100 mL | |
| Elution | Isocratic (step) | |
| Elution volume | 5 CV = 25 mL | |
| Fraction volume | 1.5 | mL |

| | |
|---|---|
| RE-equilibration volume | 5 CV = 25 mL |

[0300] Elution fractions containing protein were identified by UV absorption (A280) and pooled, then dialyzed overnight in dialysis buffer (20 mM Tris-HCl, pH 7.4, 100 mM KCl, 0.1 mM EDTA, and 50% glycerol) in a 3.5K Slide-A-Lyzer™ dialysis cassette (Thermo Fisher) for buffer exchange. Protein concentrations in the preparations were measured by absorption at 280 nm, and preparations were stored at −20° C.

### Example 8

### High Performance Liquid Chromatography (HPLC) Analysis of Nucleotides

### Sample Preparation for Reaction Analysis Using HPLC:

[0301] Reactions were quenched by the addition of 4 volume equivalents (5× dilution) or 34 volume equivalents (35× dilution) of 75% v/v MeOH/water. The plate was sealed, mixed well, and centrifuged at 4,000 rpm for 4 min at 4° C. The supernatant was collected and analyzed by HPLC using an Ultimate 3000 system.

TABLE 8.1
Method 1: Achiral HPLC Parameters (Acetonitrile Gradient)

| Instrument | Ultimate 3000 HPLC System with a PAL autosampler | |
|---|---|---|
| Column | Agilent Zorbax RR StableBond Aq, 150 × 3.0 mm × | |
| | 3.5 μm | |
| Guard Column | Agilent Zorbax StabeBond Aq, 5.0 × 3.0 mm, 1.8 μm | |
| Mobile Phases | A: 50 mM sodium phosphate, 2 mM | |
| | tetrabutylammonium bisulfate, pH 7.0 | |
| | B: Acetonitrile | |
| LC Gradient | 0-3.0 | min: 0-20% B |
| | 3.0-3.5 | min: 20% B |
| | 3.5-4.0 | min: 20-0% B |
| | 4.0-6.5 | min: 0% B |
| Flow rate | 1.5 | mL/min |
| Run time | 6.5 | min |
| Column | 30° | C. |
| temperature | | |
| Injection volume | 10 | μL |
| UV Detector | 254 | nm |

TABLE 8.2
Method 2: Achiral HPLC Parameters (Ion Pairing Gradient)

| Instrument | Ultimate 3000 HPLC System with a PAL autosampler | |
|---|---|---|
| Column | Agilent Zorbax RR StableBond Aq, 150 × 3.0 mm × | |
| | 3.5 μm | |
| Guard Column | Agilent Zorbax StabeBond Aq, 5.0 × 3.0 mm, 1.8 μm | |
| Mobile Phases | A: 50 mM sodium phosphate, 2 mM | |
| | tetrabutylammonium bisulfate, pH 7.0 | |
| | B: Acetonitrile | |
| | C: Water | |
| LC Gradient | 0-4.0 | min: 9.0% B, 48.5-16.2% C |
| | 4.0-4.5 | min: 9.0% B, 16.2-48.5% C |
| | 4.5-5.5 | min: 9.0% B, 48.5% C |
| Flow rate | 1.2 | mL/min |
| Run time | 5.5 | min |
| Column | 30° | C. |
| temperature | | |
| Injection volume | 10 | μL |
| UV Detector | 254 | nm |

TABLE 8.3
Method 3: Achiral HPLC Parameters (Isocratic)

| Instrument | Ultimate 3000 HPLC System with a PAL autosampler | |
|---|---|---|
| Column | Agilent Zorbax RR StableBond Aq, 150 × 3.0 mm × | |
| | 3.5 μm | |
| Guard Column | Agilent Zorbax StabeBond Aq, 5.0 × 3.0 mm, 1.8 μm | |
| Mobile Phases | A: 50 mM sodium phosphate, 2 mM | |
| | tetrabutylammonium bisulfate, pH 7.0 | |
| | B: Acetonitrile | |
| LC Gradient | 0-4.0 | min: 7.0% B |
| Flow rate | 1.2 | mL/min |
| Run time | 4.0 | min |
| Column | 30° | C. |
| temperature | | |
| Injection volume | 10 | μL |
| UV Detector | 254 | nm |

### Example 9

### Acetate Kinase (ACK) Expression and Purification

[0302] A previously engineered acetate kinase enzyme (ACK-101) featuring an N-terminal 6-histidine tag (See e.g., PCT/US22/23039, which is hereby incorporated by reference in its entirety) was produced in shake flask using IPTG induction according to Example 7, Method 1.

### Example 10

### Shake-Flask Screening of WT 3OK Homologs for Activity on ATP

[0303] Eight 3OK WT homologs were produced in shake flask and purified, as described in Example 7. ACK-101 was produced, as described in Example 9.

[0304] The 3OK homologs were screened for conversion of ATP to AQP, as depicted above in Scheme 1. Reactions were performed at 100 μL scale in Costar 96-well deep plates. Reactions included 1 mM ATP, 10 mM LiKAcPO₄, 1 mM MgCl₂, 0.2 g/L ACK-101, 0.5 g/L 30K, in 50 mM Tris-HCl (pH 7.5). The reactions were set up by sequential addition of 5× stocks prepared in 50 mM Tris-HCl (pH 7.5) as follows: (i) 20 μL of a 1.0 g/L ACK-101 stock was added; (ii) 20 μL of a 50 mM LiKAcPO₄ stock was added; (iii) 20 μL of a 2.5 g/L stock of 3OK purified enzyme variant was added; (iv) 20 μL of a 5 mM MgCl₂ was added; (v) 20 μL of a 5 mM ATP stock was added. After mixing well and briefly centrifuging to collect the contents in the bottom of each well, the reaction plates were heat-sealed with a peelable aluminum seal and incubated for 18 h (400 rpm, 30° C.).

[0305] Reactions were analyzed by HPLC Method 1, as described in Example 8, and the results for reaction with ATP to produce AQP are shown in their respective columns in Table 10.1.

TABLE 10.1
Conversion of 3OKs with Native ATP

| SEQ ID NO: | | |
|---|---|---|
| (nt/aa) | Source organism of 3OK gene sequence | Conversion of ATP to AQP |
| 3/4 | E coli W3110 | ++ |
| 5/6 | E coli W3110 | ++ |
| 7/8 | Thermomonas hydrothermalis | |
| 9/10 | Geobacillus stearothermophilus | ++ |
| 11/12 | Aquifex aeolicus | + |
| 13/14 | Thermotoga sp. RQ7 | +++ |
| 15/16 | Caldibacillus thermoamylovorans | +++ |

Levels of conversion of ATP to 3′-phosphorylated ATP (AQP) are defined as follows:
“+” 0.6-4.5 percent conversion,
“++” >4.5 percent conversion,
“+++” >41 percent conversion

### Example 11

[0306] Enzymatic Synthesis of NQP from Nucleoside

[chemical structure]

[0307] ACK-101 was produced and purified, as described in Example 9. AdoK (SEQ ID NO: 50) was produced and purified, as described in Example 3. AdK (SEQ ID NO: 26) was produced and purified, as described in Example 2. 3OK enzyme variants (SEQ ID NO: 14) were produced as described in Example 7 and tested in a kinase cascade resulting in the conversion of substrate nucleoside to the respective NQP.

[0308] Reactions were performed in 200 μL BioRad PCR plates. As depicted in Scheme 5 (and more generally in Scheme 3, above), reactions included 1.11 mM nucleoside, 11.1 mM LiKAcPO₄, 11.1 mM MgSO₄, 1.3 g/L ACK-101, 1.1 mg/mL 3OK (SEQ ID NO: 10 or SEQ ID NO: 14), 0.5 g/L AdK (SEQ ID NO: 26), 2.8 g/L AdoK (SEQ ID NO: 50), and 11.1 mM Tris-HCl (pH 8).

[0309] All reagents were dissolved in water. The reactions were prepared as follows: to a well was added sequentially by micropipette 10 μL 100 mM MgSO₄, 10 μL 100 mM Tris-HCl (pH 8), 10 μL 0.1 mM ATP, 10 μL 10 mM nucleoside 10 μL 11.5 mg/mL ACK-101, 10 μL 4.8 mg/mL AdK (SEQ ID NO: 26), 10 μL 25 mg/mL AdoK (SEQ ID NO: 50), 10 μL 10 mg/mL 3OK enzyme variant (SEQ ID NO: 10 or SEQ ID NO: 14), and then 10 μL 100 mM LiKAcPO₄. The plate was sealed and shaken at 400 rpm in an incubator set at 30° C. for 24 hours.

[0310] Subsequently, the reactions were quenched by removing 30 μL of the reaction mixtures, and four volume equivalents of 75% MeOH/Water (120 μL, 5× dilution) were added, as described in Example 8. Samples were analyzed by HPLC Method 2—ion pairing gradient and the results are shown in Table 11.1.

TABLE 11.1
Reaction of 3OK enzyme variants with ATP

| SEQ ID NO: | | |
|---|---|---|
| (nt/aa) | NTP Substrate | Percent Conversion to NQP |
| 13/14 | ATP | + |

Level of conversion of ATP substrate to AQP are defined as follows:
“+” >1.5 percent conversion

### Example 12

[0311] POX-Driven Enzymatic Synthesis of ATP from Adenosine without Addition of Acetyl Phosphate

[chemical structure]

[0312] ACK-101 was produced and purified, as described in Example 9. AdoK (SEQ ID NO: 50) was produced and purified, as described in Example 3. AdK (SEQ ID NO: 26) was produced and purified, as described in Example 2. Pyruvate Oxidase (POX) (SEQ ID NO: 40) was produced and purified, as described in Example 4 and tested in a kinase cascade. Use of POX precludes the need for added LiKAcPO₄ in the kinase cascade.

[0313] Reactions were performed in 1.1 mL Axygen deepwell plates. As depicted in Scheme 6 (and more generally in Scheme 4, above), reactions included 0.91 mM adenosine, 0.009 mM ATP, 9.1 mM MgSO₄, 1 g/L ACK-101, 0.4 g/L AdK (SEQ ID NO: 26), 0.46 g/L AdoK (SEQ ID NO: 50), 9.1 mM Tris-HCl (pH 8), 0.45 mM flavin adenine dinucleotide (FAD), 0.45 mM thiamine pyrophosphate (ThPP), 45.5 mM sodium pyruvate, 18 mM K₂HPO₄, and 0.26 g/L POX (SEQ ID NO: 40).

[0314] All reagents were dissolved in water. The reactions were prepared as follows: to a well was added sequentially by micropipette 10 μL 100 mM MgSO₄, 10 μL 100 mM Tris-HCl (pH 8), 10 μL 200 mM K₂HPO₄, 10 μL 10 mM adenosine 5 μL 10 mM FAD, 5 μL 10 mM ThPP, 10 μL 0.1 mM ATP, 10 μL 11.5 mg/mL ACK-101, 10 μL 4.8 mg/mL AdK (SEQ ID NO: 26), 10 μL 5.04 mg/mL AdoK (SEQ ID NO: 50), 10 μL 0.26 mg/mL POX (SEQ ID NO: 40), and 10 μL 500 mM pyruvate. The plate was sealed with a porous aeroseal and shaken at 300 rpm in an incubator set at 30° C. and 85% humidity for 17 hours.

[0315] Subsequently, the reactions were quenched by transferring 60 μL of the reaction mixture into 60 μL methanol. The quenched mixture was filtered with a 0.45 μm low-binding hydrophilic PTFE plate. A 20-μL aliquot of the filtrate was then diluted with 180 μL water. These samples were then analyzed by HPLC Method 2—ion pairing gradient in Example 8, and the results are shown in Table 12.1.

TABLE 12.1
POX-driven synthesis of ATP from adenosine

| POX SEQ ID NO: (nt/aa) | Percent conversion to ATP |
|---|---|
| 39/40 | + |

Levels of conversion of adenosine to ATP are defined as follows:
“+” >75 percent conversion

### Example 13

### IMPROVEMENTS Over SEQ ID NO: 10 in Conversion to Tetraphosphorylated Nucleotide

[chemical structure]

[0317] Libraries of engineered genes were produced from the parent gene SEQ ID NO: 10 using various techniques (e.g., saturation mutagenesis and recombination of previously identified beneficial mutations). The polypeptides encoded by each gene were produced in HTP and prepared, as described in Example 6.

[0318] Reactions were performed at 2 μL scale in 96-well format 200 μL BioRad PCR plates. Reactions included 10 mM ATP, 50 mM LiKAcPO₄, 10 mM MgCl₂, 50% v/v lysate, in 50 mM Tris-HCl (pH 7.5). The reactions were set up as follows: (i) all reaction components except for lysate were pre-mixed in a single solution, and 1 μL of this solution was aliquoted into each well of the 96-well plate; (ii) 1 μL lysate was added to each well. After briefly centrifuging to collect the contents in the bottom of each well, the reaction plates were heat-sealed with a peelable aluminum seal and incubated at 30° C. for 18 hours.

[0319] Reactions were quenched according to Example 8 by adding 34 volume equivalents (65 μL, 35× dilution) of a 75% v/v MeOH/water solution to each well. After mixing well and centrifuging, the samples were subjected to HPLC analysis according to the ion pairing gradient HPLC Method 2.

### Improved Conversion for AQP

[0320] Activity relative to SEQ ID NO: 10 was calculated as AQP product peak area of the variant compared with the product peak area observed by the reaction with SEQ ID NO: 10. The results are shown below in Table 13.1.

TABLE 13.1
Improved Conversion to AQP of Variants
Relative to SEQ ID NO: 10

| | Amino Acid Differences | |
|---|---|---|
| SEQ ID NO: | (Relative to SEQ ID | FIOP Conversion to AQP |
| (nt/aa) | NO: 10) | (Relative to SEQ ID NO: 10) |
| 55/56 | M165S | +++ |
| 57/58 | S13V | ++ |
| 59/60 | R93Y | ++ |
| 61/62 | V74K | ++ |
| 63/64 | A38E | + |
| 65/66 | V39L | + |
| 67/68 | S13A | + |
| 69/70 | H89L | + |
| 71/72 | T124W | + |
| 73/74 | A72R | + |
| 75/76 | T124V | + |

Levels of increased conversion to AQP were determined relative to the reference polypeptide of SEQ ID NO: 10 and defined as follows:
“+” 1.20 to 1.30,
“++” >1.30,
“+++” >1.7

FIOP for Phosphorylated Product (p4A) The structure of the primary byproduct has been preliminarily assigned as that of adenosine-5′-tetraphosphate (ppppA or p4A). Other phosphorylated products are also potentially formed at low levels. The structures of the potential byproducts are shown, but not limited to, those shown above in Scheme 2.

[0321] In applications where p4A is the desired product, enzyme variants with improved p4A activity will be of interest. Activity relative to SEQ ID NO: 10 was calculated as the p4A product peak area of the variant compared with the p4A product peak area observed by the reaction with SEQ ID NO: 10. The results are shown below in Table 13.2.

TABLE 13.2
Improved Conversion to p4A of Variants
Relative to SEQ ID NO: 10

| | Amino Acid Differences | |
|---|---|---|
| SEQ ID NO: | (Relative to SEQ ID | FIOP Conversion to p4A |
| (nt/aa) | NO: 10) | (Relative to SEQ ID NO: 10) |
| 77/78 | N178H | +++ |
| 79/80 | D138-/V139- | +++ |
| 81/82 | T17R | +++ |
| 83/84 | N148R | ++ |
| 85/86 | L123A | ++ |
| 87/88 | D177S | ++ |
| 89/90 | L123I | ++ |
| 91/92 | R41M | ++ |
| 93/94 | N179M | + |
| 95/96 | N178R | + |
| 97/98 | F150M | + |
| 99/100 | R60L | + |
| 101/102 | N148G | + |
| 55/56 | M165S | + |
| 103/104 | W163S | + |
| 105/106 | L144V | + |
| 107/108 | D138S | + |

Levels of increased conversion to p4A were determined relative to the reference polypeptide of SEQ ID NO: 10 and defined as follows:
“+” 1.40 to 2.00,
“++” >2.00,
“+++” >4.50

[0322] The change in AQP selectivity relative to SEQ ID NO: 10 was calculated as the percent selectivity for AQP divided by the percent selectivity for AQP in the reaction with SEQ ID NO: 10.

TABLE 13.3
Improved Selectivity for AQP of Variants
Relative to SEQ ID NO: 10

| | Amino Acid Differences | |
|---|---|---|
| SEQ ID NO: | (Relative to SEQ ID | FIOP Selectivity for AQP |
| (nt/aa) | NO: 10) | (Relative to SEQ ID NO: 10) |
| 69/70 | H89L | +++ |
| 109/110 | H89S | +++ |
| 111/112 | V92A | ++ |
| 61/62 | V74K | ++ |
| 113/114 | A36T | ++ |
| 115/116 | H89G | ++ |
| 117/118 | V74M | ++ |
| 65/66 | V39L | + |
| 119/120 | A35S | + |
| 57/58 | S13V | + |
| 121/122 | A32G | + |
| 123/124 | F150W | + |
| 125/126 | N76A | + |
| 127/128 | V40M | + |
| 129/130 | L156M | + |

Levels of increased AQP selectivity were determined relative to the reference polypeptide of SEQ ID NO: 10 and defined as follows:
““+”” 1.10 to 1.18,
““++”” >1.18,
““+++”” >1.21

[0323] The change in p4A selectivity relative to SEQ ID NO: 10 was calculated as the percent selectivity for p4A divided by the percent selectivity for p4A in the reaction with SEQ ID NO: 10.

TABLE 13.4
Improved Selectivity for p4A of Variants
Relative to SEQ ID NO: 10

| | Amino Acid Differences | |
|---|---|---|
| SEQ ID NO: | (Relative to SEQ ID | FIOP Selectivity for p4A |
| (nt/aa) | NO: 10) | (Relative to SEQ ID NO: 10) |
| 95/96 | N178R | +++ |
| 77/78 | N178H | +++ |
| 83/84 | N148R | +++ |
| 79/80 | D138-/V139- | ++ |
| 81/82 | T17R | ++ |
| 105/106 | L144V | ++ |
| 131/132 | L123V | ++ |
| 87/88 | D177S | ++ |
| 97/98 | F150M | + |
| 89/90 | L123I | + |
| 133/134 | T17Q | + |
| 101/102 | N148G | + |
| 135/136 | N178S | + |
| 85/86 | L123A | + |
| 91/92 | R41M | + |
| 137/138 | P116S | + |
| 93/94 | N179M | + |

Levels of increased p4A selectivity were determined relative to the reference polypeptide of SEQ ID NO: 10 and defined as follows:
““+”” 1.20 to 2.70,
““++”” >2.70,
““+++”” >4.60

[0324] Beneficial selectivity and activity mutations favoring AQP relative to SEQ ID NO: 10 were recombined and were produced in HTP and prepared, as described in Example 6.

[0325] Reactions were performed at 2 μL scale in 96-well format 200 μL BioRad PCR plates. Reactions included 10 mM ATP, 50 mM LiKAcPO₄, 10 mM MgCl₂, 25% v/v lysate, in 50 mM Tris-HCl (pH 7.5). The reactions were set up as follows: (i) all reaction components except for lysate were pre-mixed in a single solution, and 1 μL of this solution was aliquoted into each well of the 96-well plate; (ii) 0.5 50 mM Tris-HCl (pH 7.5) was added to each well; (iii) 0.5 μL lysate was added to each well. After briefly centrifuging to collect the contents in the bottom of each well, the reaction plates were heat-sealed with a peelable aluminum seal and incubated at 30° C. for 18 hours.

[0326] Reactions were quenched according to Example 8 by adding 34 volume equivalents (65 μL, 35× dilution) of a 75% v/v MeOH/water solution to each well. After mixing well and centrifuging, the samples were subjected to HPLC analysis according to the ion pairing gradient HPLC Method 2.

[0327] Activity relative to SEQ ID NO: 10 was calculated as AQP product peak area of the variant compared with the product peak area observed by the reaction with SEQ ID NO: 10. The results are shown below in Table 13.5.

TABLE 13.5
Improved Conversion to and Selectivity for
AQP of Variants Relative to SEQ ID NO: 10

| | | | FIOP Selectivity |
|---|---|---|---|
| | Amino Acid Differences | FIOP Conversion to | for AQP (Relative |
| SEQ ID NO: | (Relative to | AQP (Relative to | to SEQ ID NO: |
| (nt/aa) | SEQ ID NO: 10) | SEQ ID NO: 10)¹ | 10)² |
| 139/140 | S13V/A36T/A38E/V40M/A72R/ | +++ | ++ |
| | V74K/H89L/R93Y | | |
| 141/142 | N76A/H89G/R93Y/M165S | +++ | +++ |
| 143/144 | A36T/V40M/A72R/V74K/H89G/ | +++ | ++ |
| | R93Y | | |
| 145/146 | A72R/H89L/M165S | +++ | ++ |
| 147/148 | S13V/A38E/V39L/V40M/H89L/ | +++ | +++ |
| | T124W/L156M | | |
| 149/150 | A36T/A38E/V40M/A72R/V74K/ | +++ | ++ |
| | H89S/R93Y/T124W/L156M | | |
| 151/152 | S13V/V74K/H89L/R93Y | +++ | ++ |
| 153/154 | N76A/H89L/T124V/M165S | +++ | ++ |
| 155/156 | S13A/A38E/V40M/H89G | +++ | ++ |
| 157/158 | S13A/A36T/A38E/V40M/A72R/ | +++ | ++ |
| | N76A/H89G | | |
| 159/160 | S13V/A38E/V39L/V40M/A72R/ | +++ | ++ |
| | N76A/R93Y/M165S | | |
| 161/162 | V74K/H89L/R93Y/L156M | +++ | ++ |
| 163/164 | S13A/A36T/V40M/A72R/V74K/ | +++ | ++ |
| | N76A/R93Y | | |
| 165/166 | N76A/H89G/M165S | +++ | ++ |
| 167/168 | S13V/A36T/A38E/V40M/A72R/ | +++ | +++ |
| | V74K/R93Y/L156M | | |
| 169/170 | S13V/A72R/N76A/H89G/R93Y | +++ | ++ |
| 171/172 | S13V/A72R/H89L/T124W | +++ | ++ |
| 173/174 | S13A/A72R/H89L/T124W | +++ | +++ |
| 175/176 | S13V/A72R/V74K/N76A/H89L/ | +++ | ++ |
| | R93Y | | |
| 177/178 | S13A/V40M/A72R/N76A/H89L | +++ | +++ |
| 179/180 | A36T/A38E/V39L/V40M/V74K/ | +++ | ++ |
| | N76A/H89L/R93Y/T124V | | |
| 181/182 | S13V/A38E/V40M/H89G | +++ | ++ |
| 183/184 | S13V/A72S/V74K/H89L/R93Y | +++ | ++ |
| 185/186 | S13V/A36T/A38E/V40M/H89G | ++ | ++ |
| 187/188 | S13A/A72R/H89S/R93Y/T124V/ | ++ | ++ |
| | L156M | | |
| 189/190 | S13A/H89L/M165S | ++ | ++ |
| 191/192 | S13V/A72R/N76A/H89L/T124V | ++ | ++ |
| 193/194 | H89L/R93Y/T124W | ++ | ++ |
| 195/196 | V74K/N76A/H89L/R93Y/T124V | ++ | ++ |
| 197/198 | S13A/A36T/A38E/V40M/N76A/ | ++ | ++ |
| | H89S/R93Y | | |
| 199/200 | S13A/A36T/V40M/R93Y/T124V | ++ | ++ |
| 201/202 | S13V/A72R/R93Y/T124W | ++ | +++ |
| 203/204 | A38E/V40M/N76A/H89L/T124W | ++ | ++ |
| 205/206 | A72R/V74K/H89L/R93Y/T124V | ++ | + |
| 207/208 | S13V/A72R/V74K/H89L/R93Y | ++ | ++ |
| 209/210 | S13V/N76A/H89L/R93Y/L156M/ | ++ | ++ |
| | M165S | | |
| 211/212 | A38E/A72R/H89L/R93Y/T124V | ++ | + |
| 213/214 | S13V/N76A/H89G/R93Y/T124W | ++ | + |
| 215/216 | S13V/V40M | ++ | + |
| 217/218 | A72R/V74K/H89G/R93Y | ++ | + |
| 219/220 | S13V/A36T/A38E/V39L/V40M/ | ++ | +++ |
| | H89L | | |
| 221/222 | V39L/V40M/A72R/N76A | ++ | +++ |
| 223/224 | V74K/H89L/T124W | ++ | +++ |
| 225/226 | A36T/A38E/V39L/V40M/A72R/ | ++ | +++ |
| | V74K/H89L | | |
| 227/228 | S13V/A36T/A38E/V40M/V74K/ | ++ | + |
| | N76A | | |
| 229/230 | A38E/V40M/R93Y | ++ | + |
| 231/232 | S13V/H89L | ++ | + |
| 233/234 | S13A/H89L/T124V | ++ | ++ |
| 235/236 | S13V/A72R/N76A | ++ | + |
| 237/238 | S13V/N76A/H89S/R93Y | ++ | + |
| 239/240 | A36T/V39L/V40M/A72R/N76A/ | ++ | ++ |
| | H89L/R93Y | | |
| 241/242 | S13V/N76A/R93Y | ++ | + |
| 243/244 | S13V/N76A/R93Y/T124V | ++ | + |
| 245/246 | A36T/A38E/V39L/V40M/A72R/ | ++ | + |
| | V74K/N76A/T124W | | |
| 247/248 | S13V/A36T/V39L/V40M/A72R/ | ++ | + |
| | N76A/H89L/T124V | | |
| 249/250 | S13V/N76A/H89L/T124W/L156M | ++ | +++ |
| 251/252 | S13A/A72R/H89G | ++ | +++ |
| 253/254 | S13V/V74K/H89L/R93Y/T124V | + | +++ |
| 255/256 | V74K/H89S/R93Y | + | + |
| 257/258 | A72R/R93Y/T124V | + | + |
| 259/260 | S13V/A36T/A38E/V39L/A72R/ | + | ++ |
| | N76A/H89L/R93Y/T124W | | |
| 261/262 | V74K/N76A/H89L | + | +++ |
| 263/264 | A72R/N76A/H89G/R93Y | + | + |
| 265/266 | A38E/V40M/H89S/T124W | + | + |
| 267/268 | H89L/R93Y | + | +++ |
| 269/270 | S13A/T124V | + | + |
| 271/272 | H89L/T124W | + | + |
| 273/274 | N76A/H89G/R93Y/T124V | + | + |
| 275/276 | S13V/A72R/H89G | + | + |
| 277/278 | A72R/V74K/R93Y | + | +++ |
| 279/280 | S13A/A72R/N76A | + | + |
| 281/282 | A38E/V39L | + | + |
| 283/284 | A36T/V39L/V40M/N76A/R93Y/ | + | + |
| | L156M | | |
| 285/286 | S13V/T124V | + | + |
| 287/288 | S13V/A72R/V74K/N76A/H89L/ | + | + |
| | R93Y/T124V | | |
| 289/290 | S13V/A72R/T124W | + | + |
| 291/292 | S13V/A36T/V40M/A72R/L156M | + | + |
| 293/294 | A72R/V74K/N76A/H89G/T124V | + | + |
| 295/296 | S13A/A36T/A38E/V40M | + | + |
| 297/298 | S13V/A72R | + | + |
| 299/300 | N76A/R93Y | + | + |
| 301/302 | S13A/V74K/H89G/L156M | + | ++ |
| 303/304 | S13V/L156M | + | + |
| 305/306 | S13V/A72R/N76A/T124V/L156M | + | +++ |
| 307/308 | A38V/A72R/N76A/H89G | + | +++ |
| 309/310 | A72R/N76A/T124V | + | + |
| 311/312 | A38E/V40M/A72R | + | + |
| 313/314 | A72R/N76A/T124W | + | + |
| 315/316 | S13A/N76A | + | + |
| 317/318 | T124W/L156M | + | + |
| 319/320 | S13A/A38E/A72R/L156M | + | + |
| 321/322 | V74K/H89L | + | + |
| 323/324 | A72R/V74K/N76A/T124V | + | + |
| 325/326 | A38E/V40M/L156M | + | + |
| 327/328 | A72R/V74K/R93Y/T124V | + | + |
| 329/330 | A72R/N76A | + | + |
| 331/332 | S13A/H89S/M165S | + | +++ |
| 333/334 | S13V/N76A | + | + |
| 335/336 | S13V/H89G | + | + |
| 337/338 | A38E/V39L/N76A | + | + |
| 339/340 | S13V/T124W | + | + |
| 341/342 | S13V/A36T/A38E/V40M/A72R/ | + | + |
| | V74K | | |
| 343/344 | A72R/V74K/H89G | + | + |
| 345/346 | A38E/V39L/V40M/A72R/V74K/ | + | ++ |
| | N76A/H89S | | |
| 347/348 | S13V/A72R/H89L/T124V/M165S | + | +++ |
| 349/350 | S13A/N76A/T124W | + | + |
| 351/352 | S13V/A72R/V74K/H89L/R93Y/ | + | +++ |
| | T124W | | |
| 353/354 | V74K/N76A/H89G/T124V | + | + |
| 355/356 | S13V/H89S | + | +++ |
| 357/358 | S13V/N76A/H89G/L156M/M165S | + | +++ |
| 359/360 | S13V/V74K/H89S/R93Y | + | + |
| 361/362 | A38E/N76A/L156M | + | + |
| 363/364 | S13V/A36T/A38E/V40M/A72R/ | + | + |
| | V74K/T124V | | |
| 365/366 | S13V/A36T/A38E/V39L/V40M/ | + | + |
| | V74K/H89G | | |

¹Levels of increased conversion of ATP to AQP were determined relative to the reference polypeptide of SEQ ID NO: 10 and defined as follows:
“+” 1.25 to 2.04,
“++” >2.04,
“+++” >2.83
²Levels of increased selectivity for AQP were determined relative to the reference polypeptide of SEQ ID NO: 10 and defined as follows:
“+” 1.17 to 1.55,
“++” >1.55,
“+++” >1.58

### Example 14

### Capillary Electrophoresis (CE) Analysis of Oligonucleotides

### Sample Preparation for Reaction Analysis Using CE

[0328] Reaction samples were analyzed via capillary electrophoresis using an ABI 3500xl Genetic Analyzer (ThermoFisher). Reactions (2 μL) were quenched by the addition of 38 μL of 10 mM aqueous EDTA. The quenched reaction mixture was further diluted 80000 times by water. 2 μL of this quenched solution was transferred to a new 96-well MicroAmp Optical PCR plate or 384-well MicroAmp Optical PCR plate containing 18 μL Hi-Di™ Formamide (ThermoFisher) which has an appropriate size standard. The ABI3500xl was configured with POP6 polymer, 50 cm capillaries and a 45° C. oven temperature. Pre-run settings were 18 KV for 180 sec. Injection was 5 KV for 5 sec, and the run settings were 19.5 KV for 640 sec. FAM-labeled oligo substrates and products were identified by their sizes relative to the sizing ladder, with the substrate oligo peak at ˜18 or 20 bp and the products appearing in the region of ˜14-18 bp.

[0329] Reaction samples were analyzed via capillary electrophoresis using an ABI 3500xl Genetic Analyzer (ThermoFisher). Reactions (2 μL) were quenched by the addition of 38 μL of 10 mM aqueous EDTA. The quenched reaction mixture was further diluted 80000 times by water. 2 μL of this quenched solution was transferred to a new 96-well MicroAmp Optical PCR plate or 384-well MicroAmp Optical PCR plate containing 18 μL Hi-Di™ Formamide (ThermoFisher) which has an appropriate size standard. The ABI3500xl was configured with POP6 polymer, 50 cm capillaries and a 45° C. oven temperature. Pre-run settings were 18 KV for 180 sec. Injection was 5 KV for 5 sec, and the run settings were 19.5 KV for 640 sec. FAM-labeled oligo substrates and products were identified by their sizes relative to the sizing ladder, with the substrate oligo peak at ˜18 or 20 bp and the products appearing in the region of ˜14-18 bp.

TABLE 14.1
List of substrate and product oligonucleotides

| Structural Description | SEQ ID NO: |
|---|---|
| 5′-6-FAM-T15AT*mG | 2129 |
| 5′-6-FAM-T17mAmUmC | 2130 |
| 5′-6-FAM-T15AT*mGrA-3′P | 2131 |
| 5′-6-FAM-T15AT*mGrG-3′P | 2132 |
| 5′-6-FAM-T15AT*mGrC-3′P | 2133 |
| 5′-6-FAM-T15AT*mGrU-3′P | 2134 |
| 5′-6-FAM-T15AT*mG(2′dF)A-3′P | 2135 |
| 5′-6-FAM-T15AT*mG(2′dF)G-3′P | 2136 |
| 5′-6-FAM-T15AT*mG(2′dF)C-3′P | 2137 |
| 5′-6-FAM-T15AT*mG(2′dF)U-3′P | 2138 |
| 5′-6-FAM-T15AT*mGmA-3′P | 2139 |
| 5′-6-FAM-T15AT*mGmG-3′P | 2140 |
| 5′-6-FAM-T15AT*mGmC-3′P | 2141 |
| 5′-6-FAM-T15AT*mGmU-3′P | 2142 |
| 5′-6-FAM-T15AT*mG*rA-3′P | 2143 |
| 5′-6-FAM-T15AT*mG*rG-3′P | 2144 |
| 5′-6-FAM-T17mAmUmCrA-3′P | 2145 |
| 5′-6-FAM-T17mAmUmCrG-3′P | 2146 |
| 5′-6-FAM-T17mAmUmCrC-3′P | 2147 |
| 5′-6-FAM-T17mAmUmCrU-3′P | 2148 |
| 5′-6-FAM-T17mAmUmC(2′dF)A-3′P | 2149 |
| 5′-6-FAM-T17mAmUmC(2′dF)G-3′P | 2150 |
| 5′-6-FAM-T17mAmUmC(2′dF)C-3′P | 2151 |
| 5′-6-FAM-T17mAmUmC(2′dF)U-3′P | 2152 |
| 5′-6-FAM-T17mAmUmCmA-3′P | 2153 |
| 5′-6-FAM-T17mAmUmCmG-3′P | 2154 |
| 5′-6-FAM-T17mAmUmCmC-3′P | 2155 |
| 5′-6-FAM-T17mAmUmCmU-3′P | 2156 |
| 5′-6-FAM-T17mAmUmC*rA-3′P | 2157 |
| 5′-6-FAM-T17mAmUmC*rG-3′P | 2158 |
| 5′-6-FAM-T17mAmUmCdA-3′P | 2159 |
| 5′-6-FAM-T17mAmUmCdG-3′P | 2160 |
| 5′-6-FAM-T17mAmUmCdC-3′P | 2161 |
| 5′-6-FAM-T17mAmUmCdT-3′P | 2162 |

### Example 15

### 3OK Expression and Heat Lysis in High Throughput (HTP) Using Thermal Lysis

### High Throughput (HTP) Growth of 3OK Enzyme and Variants and Thermal Lysis

[0330] Transformed E. coli cells were selected by plating onto LB agar plates containing 1% glucose and 30 μg/ml chloramphenicol. After overnight incubation at 37° C., colonies were placed into the wells of 96-well shallow flat bottom NUNC™ (Thermo-Scientific) plates filled with 180 μl/well LB medium supplemented with 1% glucose and 30 μg/ml chloramphenicol. The cultures were allowed to grow overnight for 18-20 hours in a shaker (200 rpm, 30° C., and 85% relative humidity; Kuhner). Overnight growth samples (20 μL) were transferred into Costar 96-well deep plates filled with 380 μL of Terrific Broth supplemented with 30 μg/ml chloramphenicol. The plates were incubated for 120 minutes in a shaker (250 rpm, 30° C., and 85% relative humidity; Kuhner) until the OD₆₀₀ reached between 0.4-0.8. The cells were then induced with 40 μL of 10 mM IPTG in sterile water and incubated overnight for 18-20 hours in a shaker (250 rpm, 30° C., and 85% relative humidity; Kuhner). The cells were pelleted (4,000 rpm for 20 min), the supernatants were discarded, and the cells were frozen at −80° C. prior to analysis.

[0331] For lysis, buffer (as specified in each example) and 0.1 g/L lysozyme were added to the cell pellet in each well. The cells were shaken vigorously at room temperature for 10 minutes on a bench top shaker. A 100-μLor 150-μL aliquot of the re-suspended cells was transferred to a 96-well format 200 μL BioRad PCR plate, then briefly spun-down prior to 1-hour heat treatment at specific temperature. Following heat-treatment, the cell debris was pelleted by centrifugation (4,000 rpm, 4° C., 20 min), and clear supernatants were then used in biocatalytic reactions to determine their activity levels.

### Example 16

### Improvements Over SEQ ID NO: 142 in Conversion to Tetraphosphorylated Nucleotide

### HTP Screening for Improved 3OK Variants

[0332] SEQ ID NO: 142 was selected as the parent 3OK enzyme. Libraries of engineered genes were produced from the parent gene using well-established techniques (e.g., saturation mutagenesis and recombination of previously identified beneficial mutations). The polypeptides encoded by each gene were produced in HTP and prepared as described in Table 16.1.

[0333] Reactions were performed at 2 μL scale in 96-well format 200 μL BioRad PCR plates. Reactions included substrate, LiKAcPO₄, MgCl₂, AcK101, 50% v/v lysate, in Tris-HCl. The reactions were set up as follows: (i) all reaction components except for lysate were pre-mixed in a single solution, and 1 μL of this solution was aliquoted into each well of the 96-well plate; (ii) 1 μL lysate was added to each well. After briefly centrifuging to collect the contents in the bottom of each well, the reaction plates were heat-sealed with a peelable aluminum seal and incubated at 30° C. for indicated hours, then held at 4° C. until the reaction was quenched.

[0334] Reactions were quenched according to Example 8 by adding 34 volume equivalents (65 μL, 35× dilution) of a 75% v/v MeOH/water solution to each well. After mixing well and centrifuging, the samples were subjected to HPLC analysis according to the ion pairing gradient HPLC Method 2.

TABLE 16.1
All lysis, reaction, quench, and analytical properties

Lysis conditions: Lysis buffer - 50 mM Tris-HCl buffer, pH 7.5, 0.1 g/L lysozyme; Lysis buffer
volume - 200 μL; Lysate pre-treatment - Lysates were heat-treated at 55° C. and processed as
described in Example 15. The heat-treated and clarified HTP lysates were used in reactions.
Reaction conditions: Substrate - 10 mM ATP; Reaction buffer - 50 mM Tris-HCl, pH 7.5, 50 mM
LiKAcPO₄, 10 mM Magnesium chloride, 0.2 g/L AcK101; Lysate dilution - None; Reaction time - 18
hour
Quench conditions: Reactions were quenched and analyzed by HPLC as described in Example 8

[0335] Activity relative to SEQ ID NO: 2 (Activity FIOP) was calculated as the fold-improvement of conversion of the variant divided by the conversion observed in the reaction with SEQ ID NO: 2 (where the conversion may be set as the average of replicates or else the highest single sample as appropriate). Conversion was calculated as 3′PO4 product peak areas over the total of the unreacted substrate, byproduct, and 3′PO4 product peak areas. The results are shown in Table 16.2.

TABLE 16.2
Relative to SEQ ID NO: 142

| | Amino Acid Differences | Activity FIOP |
|---|---|---|
| SEQ ID | (Relative to | Conversion Relative |
| NO: (nt/aa) | SEQ ID NO: 142) | to SEQ ID NO: 142 |
| 371/372 | S13E/A76S/Y93Q/A198L | +++ |
| 373/374 | T181N | ++ |
| 375/376 | A68G/H103V/T181N/I182E | + |
| 377/378 | I182E | + |
| 379/380 | Y93L/A198L | + |
| 381/382 | S13E/A76S/Y93Q | + |
| 383/384 | K82T/A198I | + |
| 385/386 | S13E/A76S/A198L | + |

Levels of increased activity were determined relative to the reference polypeptide of SEQ ID NO: 142 and defined as follows:
“+” 1.0 to 1.5,
“++” 1.5 to 2.4,
“+++” 2.4.

### Example 17

### Improvements Over SEQ ID NO: 142 in Conversion to Tetraphosphorylated Nucleotide

### HTP Screening for Improved 3OK Variants

[0336] SEQ ID NO: 142 was selected as the parent 3OK enzyme. Libraries of engineered genes were produced from the parent gene using well-established techniques (e.g., saturation mutagenesis and recombination of previously identified beneficial mutations). The polypeptides encoded by each gene were produced in HTP and prepared as described in Table 17.1.

[0337] Reactions were performed at 2 μL scale in 96-well format 200 μL BioRad PCR plates. Reactions included substrate, LiKAcPO₄, MgCl₂, AcK101, 50% v/v lysate, in Tris-HCl. The reactions were set up as follows: (i) all reaction components except for lysate were pre-mixed in a single solution, and 1 μL of this solution was aliquoted into each well of the 96-well plate; (ii) 1 μL lysate was added to each well. After briefly centrifuging to collect the contents in the bottom of each well, the reaction plates were heat-sealed with a peelable aluminum seal and incubated at 30° C. for indicated hours, then held at 4° C. until the reaction was quenched.

[0338] Reactions were quenched according to Example 8 by adding 34 volume equivalents (65 μL, 35× dilution) of a 75% v/v MeOH/water solution to each well. After mixing well and centrifuging, the samples were subjected to HPLC analysis according to the ion pairing gradient HPLC Method 2.

TABLE 17.1
All lysis, reaction, quench, and analytical properties

Lysis conditions: Lysis buffer - 50 mM Tris-HCl buffer, pH 7.5, 0.1 g/L lysozyme; Lysis buffer
volume - 200 μL; Lysate pre-treatment - Lysates were heat-treated at 60° C. and processed as
described in Example 15. The heat-treated and clarified HTP lysates were used in reactions.
Reaction conditions: Substrate - 10 mM ATP; Reaction buffer - 50 mM Tris-HCl, pH 7.5, 50 mM
LiKAcPO₄, 10 mM Magnesium chloride, 0.2 g/L AcK101; Lysate dilution - None; Reaction time - 1
hour

[0339] Activity relative to SEQ ID NO: 142 (Activity FIOP) was calculated as the fold-improvement of conversion of the variant divided by the conversion observed in the reaction with SEQ ID NO: 142 (where the conversion may be set as the average of replicates or else the highest single sample as appropriate). Conversion was calculated as 3′P04 product peak areas over the total of the unreacted substrate, byproduct, and 3′P04 product peak areas. The results are shown in Table 17.2.

TABLE 17.2
Relative to SEQ ID NO: 142

| SEQ ID | | Activity FIOP |
|---|---|---|
| NO: | Amino Acid Differences | Conversion Relative to |
| (nt/aa) | (Relative to SEQ ID NO: 142) | SEQ ID NO: 142 |
| 387/388 | G200C | +++ |
| 389/390 | Y93L | +++ |
| 391/392 | H103L | +++ |
| 393/394 | Y93M | +++ |
| 395/396 | Y93E | ++ |
| 397/398 | Y93Q | ++ |
| 399/400 | V111I | ++ |
| 387/388 | G200C | +++ |
| 389/390 | Y93L | +++ |
| 391/392 | H103L | +++ |
| 393/394 | Y93M | +++ |
| 395/396 | Y93E | ++ |
| 397/398 | Y93Q | ++ |
| 399/400 | V111I | ++ |
| 401/402 | H210S | ++ |
| 403/404 | A191D | ++ |
| 405/406 | H210E | ++ |
| 407/408 | K82E | ++ |
| 409/410 | Y93C | + |
| 411/412 | Y93V | + |
| 413/414 | A76S | + |
| 415/416 | H210P | + |
| 417/418 | H211K | + |
| 419/420 | G200D | + |
| 421/422 | H210Q | + |
| 377/378 | I182E | + |
| 423/424 | Y93I | + |
| 425/426 | A86S | + |
| 427/428 | A68Q | + |
| 429/430 | V88L | + |
| 431/432 | Y93F | + |
| 433/434 | G200E | + |
| 435/436 | H210V | + |
| 437/438 | V83M | + |
| 439/440 | H103Y | + |
| 441/442 | H210T | + |
| 443/444 | A68R | + |
| 445/446 | A91E | + |
| 447/448 | V169I | + |

Levels of increased activity were determined relative to the reference polypeptide of SEQ ID NO: 142 and defined as follows: “+” 1.1 to 1.6, “++” 1.6 to 2.0, “+++” 2.0 to 3.3.

### Example 18

### Improvements Over SEQ ID NO: 372 in Conversion to Tetraphosphorylated Nucleotide

### HTP Screening for Improved 3OK Variants

[0340] SEQ ID NO: 372 was selected as the parent 3OK enzyme. Libraries of engineered genes were produced from the parent gene using well-established techniques (e.g., saturation mutagenesis and recombination of previously identified beneficial mutations). The polypeptides encoded by each gene were produced in HTP and prepared as described in Table 18.1.

[0341] Reactions were performed at 2 μL scale in 96-well format 200 μL BioRad PCR plates. Reactions included substrate, LiKAcPO₄, MgCl₂, AcK101, 50% v/v lysate, in Tris-HCl. The reactions were set up as follows: (i) all reaction components except for lysate were pre-mixed in a single solution, and 1 μL of this solution was aliquoted into each well of the 96-well plate; (ii) 1 μL lysate was added to each well. After briefly centrifuging to collect the contents in the bottom of each well, the reaction plates were heat-sealed with a peelable aluminum seal and incubated at 30° C. for indicated hours, then held at 4° C. until the reaction was quenched by 6 μL of MeOH. The reaction mixture was further diluted to 40 μM by water, then coupled with FAM labeled oligo as described in Table 18.1. The reaction plates were heat-sealed with a peelable aluminum seal and incubated at 30° C. for 1 h and 95° C. for 2 min, then held at 4° C. until the reaction was quenched.

[0342] Reactions were quenched and analyzed by CE analysis as described in Example 14.

TABLE 18.1
All lysis, reaction, quench, and analytical properties

Lysis conditions: Lysis buffer - 50 mM Tris-HCl buffer, pH 7.5, 0.1 g/L lysozyme; Lysis buffer
volume - 200 μL; Lysate pre-treatment - Lysates were heat-treated at 55° C. and processed as
described in Example 15. The heat-treated and clarified HTP lysates were used in reactions.
Reaction conditions: Substrate - 10 mM GTP; Reaction buffer - 50 mM Tris-HCl, pH 7.5, 50 mM
LiKAcPO_{4,} 10 mM Magnesium chloride, 0.2 g/L AcK101; Lysate dilution - None; Reaction time -
18 hours
TdT coupling reaction conditions: Substrate - 10 μM SEQ ID NO: 2129, 10 μM previous reaction
mixture; Reaction buffer - 20 mM TEoA, pH 7.8, 50 mM CoCl₂, 0.001 U/μL IPP; Enzyme: 4 μM
SEQ ID NO: 2125

[0343] Activity relative to SEQ ID NO: 372 (Activity FIOP) was calculated as the fold-improvement of conversion of the variant divided by the conversion observed in the reaction with SEQ ID NO: 142 (where the conversion may be set as the average of replicates or else the highest single sample as appropriate). Conversion was calculated as 3′PO4 product (SEQ ID NO: 2132) peak areas over the total of the unreacted substrate, byproduct, and 3′PO4 product (SEQ ID NO: 2132) peak areas. The results are shown in Table 18.2.

TABLE 18.2
Relative to SEQ ID NO: 372

| SEQ ID | | Activity FIOP |
|---|---|---|
| NO: | Amino Acid Differences | Conversion Relative to |
| (nt/aa) | (Relative to SEQ ID NO: 372) | SEQ ID NO: 372 |
| 449/450 | E13A/V40M/A68Q/V74R/Q93L/ | +++ |
| | A157K | |
| 451/452 | E13A/V40M/A68R/A157K | + |
| 453/454 | V40M/A68R/R81L | + |

Levels of increased activity were determined relative to the reference polypeptide of SEQ ID NO: 372 and defined as follows: “+” 1.1 to 1.6, “++” 1.6 to 2.3, “+++” 2.3 to 2.38.

### Example 19

### Improvements Over SEQ ID NO: 450 in Conversion to Tetraphosphorylated Nucleotide

### HTP Screening for Improved 3OK Variants

[0344] SEQ ID NO: 450 was selected as the parent 3OK enzyme. Libraries of engineered genes were produced from the parent gene using well-established techniques (e.g., saturation mutagenesis and recombination of previously identified beneficial mutations). The polypeptides encoded by each gene were produced in HTP and prepared as described in Table 19.1.

[0345] Reactions were performed at 2 μL scale in 96-well format 200 μL BioRad PCR plates. Reactions included substrate, LiKAcPO₄, MgCl₂, AcK101, 50% v/v lysate, in Tris-HCl. The reactions were set up as follows: (i) all reaction components except for lysate were pre-mixed in a single solution, and 1 μL of this solution was aliquoted into each well of the 96-well plate; (ii) 1 μL lysate was added to each well. After briefly centrifuging to collect the contents in the bottom of each well, the reaction plates were heat-sealed with a peelable aluminum seal and incubated at 30° C. for indicated hours, then held at 4° C. until the reaction was quenched by 6 μL of MeOH. The reaction mixture was further diluted to 40 μM by water, then coupled with FAM labeled TdT oligo as described in Table 19.1. The reaction plates were heat-sealed with a peelable aluminum seal and incubated at 30° C. for 1 h and 95° C. for 2 min, then held at 4° C. until the reaction was quenched.

[0346] Reactions were quenched and analyzed by CE analysis as described in Example 14.

TABLE 19.1
All lysis, reaction, quench, and analytical properties

Lysis conditions: Lysis buffer - 50 mM Tris-HCl buffer, pH 7.5, 0.1 g/L lysozyme; Lysis buffer
volume - 200 μL; Lysate pre-treatment - Lysates were heat-treated at 65° C. and processed as
described in Example 15. The heat-treated and clarified HTP lysates were used in reactions.
Reaction conditions: Substrate - 10 mM ATP; Reaction buffer - 50 mM Tris-HCl, pH 7.5, 50 mM
LiKAcPO_{4,} 10 mM Magnesium chloride, 0.2 g/L AcK101; Lysate dilution - None; Reaction time -
2.25 hour
TdT coupling reaction conditions: Substrate - 10 μM SEQ ID NO: 2129, 10 μM above reaction
mixture; Reaction buffer - 20 mM TEoA, pH 7.8, 50 mM CoCl₂, 0.001 U/μL IPP; Enzyme: 4 μM
SEQ ID NO: 2125

[0347] Activity relative to SEQ ID NO: 450 (Activity FIOP) was calculated as the fold-improvement of conversion of the variant divided by the conversion observed in the reaction with SEQ ID NO: 450 (where the conversion may be set as the average of replicates or else the highest single sample as appropriate). Conversion was calculated as 3′ P4O product (SEQ ID NO: 2131) peak areas over the total of the unreacted substrate, byproduct, and 3′PO4 product (SEQ ID NO: 2131) peak areas. The results are shown in Table 19.2.

TABLE 19.2
Relative to SEQ ID NO: 450

| SEQ ID | | Activity FIOP |
|---|---|---|
| NO: | Amino Acid Differences | Conversion Relative to |
| (nt/aa) | (Relative to SEQ ID NO: 450) | SEQ ID NO: 450 |
| 455/456 | A72Q/K82E/A91E/T124S/A166E/ | +++ |
| | I182E | |
| 457/458 | R48H/V135D/G200E | +++ |
| 459/460 | A91E/T124Q/A166E/I182E/K201N | +++ |
| 461/462 | K82E/V88L/A91E/I182E | +++ |
| 463/464 | K82T | +++ |
| 465/466 | V135D/G200E | +++ |
| 467/468 | R48H/V135D | +++ |
| 469/470 | K82E/A166E/I182E | ++ |
| 471/472 | R81L/V135D/G200D | ++ |
| 473/474 | H103I/V135D | ++ |
| 475/476 | K82T/V88L/T124Q/A166E | ++ |
| 477/478 | H103M | ++ |
| 479/480 | R48H/V135D/V175W | ++ |
| 481/482 | V135D | ++ |
| 483/484 | H103L/V135D/G200C | ++ |
| 485/486 | R48H/H103L/G200E | ++ |
| 487/488 | R48H/R81L | ++ |
| 489/490 | R81L/V135D | ++ |
| 491/492 | R48H/H103I/G200N | + |
| 493/494 | H103L | + |
| 495/496 | R41K/A86S/T181N/A191D | + |
| 497/498 | H103F/G200N | + |
| 499/500 | I182E | + |
| 501/502 | R81L/H103M | + |
| 503/504 | R41V/A46T/L190V/A191D | + |
| 505/506 | V175W/G200D | + |
| 507/508 | R81L/G200C | + |
| 509/510 | G200D | + |
| 511/512 | R81L/H103L | + |
| 513/514 | R48H/H103V/V175W/G200C | + |
| 515/516 | K82L/V88M/A91E/T124Q/A166E/ | + |
| | I182E | |
| 517/518 | K82M/T124Q/A166E | + |
| 519/520 | T124Q/A166E/I182E | + |
| 521/522 | R48H | + |
| 523/524 | A166E/I182E | + |
| 525/526 | R48H/H103L/G200C | + |
| 527/528 | R81L/H103I | + |
| 529/530 | V135D/V175W/G200N | + |
| 531/532 | R81L/G200D | + |
| 533/534 | K82L/A166E/I182E | + |
| 535/536 | R48H/R81L/H103L | + |
| 537/538 | G200C | + |
| 539/540 | H103I/V175W | + |
| 541/542 | T124Q/A166I | + |
| 543/544 | G2009 | + |
| 545/546 | A72H/A166I/I182E | + |
| 547/548 | H103I | + |
| 549/550 | K82L/T124S/A166I/I182E | + |
| 551/552 | R41V/V83M/A86S/T181N/L190V/ | + |
| | A191D | |
| 553/554 | R41V/T181N/A191D | + |
| 555/556 | A86S | + |
| 557/558 | A91E | + |

Levels of increased activity were determined relative to the reference polypeptide of SEQ ID NO: 450 and defined as follows: “+” 1.1 to 1.3, “++” 1.3 to 1.6, “+++” 1.6 to 2.1.

### Example 20

### Improvements Over SEQ ID NO: 450 in Conversion to Tetraphosphorylated Nucleotide

### HTP Screening for Improved 3OK Variants

[0348] SEQ ID NO: 450 was selected as the parent 3OK enzyme. Libraries of engineered genes were produced from the parent gene using well-established techniques (e.g., saturation mutagenesis and recombination of previously identified beneficial mutations). The polypeptides encoded by each gene were produced in HTP and prepared as described in Table 20.1.

[0349] Reactions were performed at 2 μL scale in 96-well format 200 μL BioRad PCR plates. Reactions included substrate, LiKAcPO₄, MgCl₂, AcK101, 50% v/v lysate, in Tris-HCl. The reactions were set up as follows: (i) all reaction components except for lysate were pre-mixed in a single solution, and 1 μL of this solution was aliquoted into each well of the 96-well plate; (ii) 1 μL lysate was added to each well. After briefly centrifuging to collect the contents in the bottom of each well, the reaction plates were heat-sealed with a peelable aluminum seal and incubated at 30° C. for indicated hours, then held at 4° C. until the reaction was quenched by 6 μL of MeOH. The reaction mixture was further diluted to 40 μM by water, then coupled with FAM labeled TdT oligo as described in Table 20.1. The reaction plates were heat-sealed with a peelable aluminum seal and incubated at 30° C. for 1 h and 95° C. for 2 min, then held at 4° C. until the reaction was quenched.

[0350] Reactions were quenched and analyzed by CE analysis as described in Example 14.

TABLE 20.1
All lysis, reaction, quench, and analytical properties

Lysis conditions: Lysis buffer - 50 mM Tris-HCl buffer, pH 7.5, 0.1 g/L lysozyme; Lysis buffer
volume - 200 μL; Lysate pre-treatment - Lysates were heat-treated at 50° C. and processed as
described in Example 15. The heat-treated and clarified HTP lysates were used in reactions.
Reaction conditions: Substrate - 10 mM GTP; Reaction buffer - 50 mM Tris-HCl, pH 7.5, 50 mM
LiKAcPO_{4,} 10 mM Magnesium chloride, 0.2 g/L AcK101; Lysate dilution - None; Reaction time -
16 hour
TdT coupling reaction conditions: Substrate - 10 μM SEQ ID NO: 2129, 10 μM above reaction
mixture; Reaction buffer - 20 mM TEoA, pH 7.8, 50 mM CoCl₂, 0.001 U/μL IPP; Enzyme: 4 μM
SEQ ID NO: 2125

[0351] Activity relative to SEQ ID NO: 450 (Activity FIOP) was calculated as the fold-improvement of conversion of the variant divided by the conversion observed in the reaction with SEQ ID NO: 450 (where the conversion may be set as the average of replicates or else the highest single sample as appropriate). Conversion was calculated as 3′PO4 product (SEQ ID NO: 2132) peak areas over the total of the unreacted substrate, byproduct, and 3′PO4 product (SEQ ID NO: 2132) peak areas. The results are shown

TABLE 20.2
Relative to SEQ ID NO: 450

| SEQ ID | | Activity FIOP |
|---|---|---|
| NO: | Amino Acid Differences | Conversion Relative to |
| (nt/aa) | (Relative to SEQ ID NO: 450) | SEQ ID NO: 450 |
| 485/486 | R48H/H103L/G200E | ++ |
| 487/488 | R48H/R81L | +++ |
| 491/492 | R48H/H103I/G200N | + |
| 493/494 | H103L | + |
| 495/496 | R41K/A86S/T181N/A191D | + |
| 497/498 | H103F/G200N | + |
| 501/502 | R81L/H103M | +++ |
| 507/508 | R81L/G200C | +++ |
| 509/510 | G200D | + |
| 511/512 | R81L/H103L | +++ |
| 521/522 | R48H | +++ |
| 525/526 | R48H/H103L/G200C | ++ |
| 527/528 | R81L/H103I | +++ |
| 531/532 | R81L/G200D | +++ |
| 535/536 | R48H/R81L/H103L | ++ |
| 537/538 | G200C | + |
| 539/540 | H103I/V175W | ++ |
| 541/542 | T124Q/A166I | + |
| 543/544 | G200N | ++ |
| 545/546 | A72H/A166I/I182E | + |
| 547/548 | H103I | + |
| 559/560 | R81L/V175W/G200E | +++ |
| 561/562 | R81L | +++ |
| 563/564 | R81L/V175W/G200N | ++ |
| 565/566 | A72H/K82E/A91E | ++ |
| 567/568 | A72H/K82T/V88L/T124Q/A166E | ++ |
| 569/570 | R48H/G200N | ++ |
| 571/572 | R41K/K95I/V111I/T181N/L190V/ | + |
| | A191D | |
| 573/574 | A72H/I182E | + |
| 575/576 | T124S | + |
| 577/578 | A46T/V83M/L190V/A191D | + |
| 579/580 | V175W | + |
| 581/582 | A72H | + |
| 583/584 | A72H/A166E | + |
| 585/586 | H103L/V175W/G200D | + |
| 587/588 | R41K/A46T/A86S/K95I/V111I | + |
| 589/590 | K82L/T124Q/A166L | + |
| 591/592 | A72H/K82L/A166I | + |
| 593/594 | A166L | + |
| 595/596 | A46T/L190V/A191D | + |
| 597/598 | R41K/L190V | + |
| 599/600 | A91E/A166E | + |
| 601/602 | R41K/A86S/T181N/L190V/A191D | + |
| 603/604 | A46T/A86S/T181N/L190V/A191D | + |
| 605/606 | V88L/A166E | + |
| 607/608 | R41K/A46T/A86S/K95L/A191D | + |
| 609/610 | A72H/T124Q/A166I | + |
| 611/612 | R48H/R81L/H103L/V175W/G200C | + |

Levels of increased activity were determined relative to the reference polypeptide of SEQ ID NO: 450 and defined as follows: “+” 1.1 to 1.5, “++” 1.5 to 1.9, “+++” 1.9 to 2.5.

### Example 21

### Improvements Over SEQ ID NO: 450 in Conversion to Tetraphosphorylated Nucleotide

### HTP Screening for Improved 3OK Variants

[0352] SEQ ID NO: 450 was selected as the parent 3OK enzyme. Libraries of engineered genes were produced from the parent gene using well-established techniques (e.g., saturation mutagenesis and recombination of previously identified beneficial mutations). The polypeptides encoded by each gene were produced in HTP and prepared as described in Table 21.1.

[0353] Reactions were performed at 2 μL scale in 96-well format 200 μL BioRad PCR plates. Reactions included substrate, LiKAcPO₄, MgCl₂, AcK101, 50% v/v lysate, in Tris-HCl. The reactions were set up as follows: (i) all reaction components except for lysate were pre-mixed in a single solution, and 1 μL of this solution was aliquoted into each well of the 96-well plate; (ii) 1 μL lysate was added to each well. After briefly centrifuging to collect the contents in the bottom of each well, the reaction plates were heat-sealed with a peelable aluminum seal and incubated at 30° C. for indicated hours, then held at 4° C. until the reaction was quenched by 6 μL of MeOH. The reaction mixture was further diluted to 40 μM by water, then coupled with FAM labeled TdT oligo as described in Table 21.1. The reaction plates were heat-sealed with a peelable aluminum seal and incubated at 30° C. for 1 h and 95° C. for 2 min, then held at 4° C. until the reaction was quenched.

[0354] Reactions were quenched and analyzed by CE analysis as described in Example 14.

TABLE 21.1
All lysis, reaction, quench, and analytical properties

Lysis conditions: Lysis buffer - 50 mM Tris-HCl buffer, pH 7.5, 0.1 g/L lysozyme; Lysis buffer
volume - 400 μL; Lysate pre-treatment - Lysates were heat-treated at 50° C. and processed as
described in Example 15. The heat-treated and clarified HTP lysates were used in reactions.
Reaction conditions: Substrate - 10 mM GTP; Reaction buffer - 50 mM Tris-HCl, pH 7.5, 50 mM
LiKAcPO_{4,} 10 mM Magnesium chloride, 0.2 g/L AcK101; Lysate dilution - None; Reaction time -
16 hour
TdT coupling reaction conditions: Substrate - 10 μM SEQ ID NO: 2129 10 μM above reaction
mixture; Reaction buffer - 20 mM TEoA, pH 7.8, 50 mM CoCl₂, 0.001 U/μL IPP; Enzyme: 4 μM
SEQ ID NO: 2125

[0355] Activity relative to SEQ ID NO: 450 (Activity FIOP) was calculated as the fold-improvement of conversion of the variant divided by the conversion observed in the reaction with SEQ ID NO: 450 (where the conversion may be set as the average of replicates or else the highest single sample as appropriate). Conversion was calculated as 3′PO4 product (SEQ ID NO: 2132) peak areas over the total of the unreacted substrate, byproduct, and 3′PO4 product (SEQ ID NO: 2132) peak areas. The results are shown in Table 21.2.

TABLE 21.2
Relative to SEQ ID NO: 450

| SEQ ID | | Activity FIOP |
|---|---|---|
| NO: | Amino Acid Differences | Conversion Relative to |
| (nt/aa) | (Relative to SEQ ID NO: 450) | SEQ ID NO: 450 |
| 613/614 | W126L | +++ |
| 615/616 | F3V | ++ |
| 617/618 | A61E | ++ |
| 619/620 | R171M | + |
| 621/622 | W126C | + |
| 623/624 | R105K | + |
| 625/626 | R142K | + |
| 627/628 | W126V | + |
| 629/630 | H125Q | + |

Levels of increased activity were determined relative to the reference polypeptide of SEQ ID NO: 450 and defined as follows: “+” 1.0 to 1.3, “++” 1.3to 1.7, “+++” 1.7 to 2.1.

### Example 22

### Improvements Over SEQ ID NO: 450 in Conversion to Tetraphosphorylated Nucleotide

### HTP Screening for Improved 3OK Variants

[0356] SEQ ID NO: 450 was selected as the parent 3OK enzyme. Libraries of engineered genes were produced from the parent gene using well-established techniques (e.g., saturation mutagenesis and recombination of previously identified beneficial mutations). The polypeptides encoded by each gene were produced in HTP and prepared as described in Table 22.1.

[0357] Reactions were performed at 2 μL scale in 96-well format 200 μL BioRad PCR plates. Reactions included substrate, LiKAcPO₄, MgCl₂, AcK101, 50% v/v lysate, in Tris-HC. The reactions were set up as follows: (i) all reaction components except for lysate were pre-mixed in a single solution, and 1 μL of this solution was aliquoted into each well of the 96-well plate; (ii) 1 μL lysate was added to each well. After briefly centrifuging to collect the contents in the bottom of each well, the reaction plates were heat-sealed with a peelable aluminum seal and incubated at 30° C. for indicated hours, then held at 4° C. until the reaction was quenched by 6 μL of MeOH. The reaction mixture was further diluted to 40 μM by water, then coupled with FAM labeled TdT oligo as described in Table 22.1. The reaction plates were heat-sealed with a peelable aluminum seal and incubated at 30 DC for 1 h and 95° C. for 2 min, then held at 4 NC until the reaction was quenched.

[0358] Reactions were quenched and analyzed by CE analysis as described in Example 14.

TABLE 22.1
All lysis, reaction, quench, and analytical properties

Lysis conditions: Lysis buffer - 50 mM Tris-HCl buffer, pH 7.5, 0.1 g/L lysozyme; Lysis buffer volume - 400
μL; Lysate pre-treatment - Lysates were heat-treated at 50° C. and processed as described in Example 15. The
heat-treated and clarified HTP lysates were used in reactions.
Reaction conditions: Substrate - 1 mM CTP; Reaction buffer - 50 mM Tris-HCl, pH 7.5, 50 mM LiKAcPO_{4,} 10
mM Magnesium chloride, 0.2 g/L AcK101; Lysate dilution - None; Reaction time - 16 hour
TdT coupling reaction conditions: Substrate - 10 μM SEQ ID NO: 2129, 10 μM above reaction mixture; Reaction
buffer - 20 mM TEoA, pH 7.8, 50 mM CoCl₂, 0.001 U/μL IPP; Enzyme: 4 μM SEQ ID NO: 2125

[0359] Activity relative to SEQ ID NO: 450 (Activity FIOP) was calculated as the fold-improvement of conversion of the variant divided by the conversion observed in the reaction with SEQ ID NO: 450 (where the conversion may be set as the average of replicates or else the highest single sample as appropriate). Conversion was calculated as 3′ P04 product (SEQ ID NO: 2133) peak areas over the total of the unreacted substrate, byproduct, and 3′PO4 product (SEQ ID NO: 2133) peak areas. The results are shown in Table 22.2.

TABLE 22.2
Relative to SEQ ID NO: 450

| SEQ ID | | Activity FIOP |
|---|---|---|
| NO: | Amino Acid Differences | Conversion Relative to |
| (nt/aa) | (Relative to SEQ ID NO: 450) | SEQ ID NO: 450 |
| 621/622 | W126C | + |
| 631/632 | A36R | +++ |
| 633/634 | W126A | +++ |
| 635/636 | I50M | +++ |
| 637/638 | N85R | +++ |
| 639/640 | N85L | +++ |
| 641/642 | E78A | ++ |
| 643/644 | G122A | ++ |
| 645/646 | G203C | ++ |
| 647/648 | K100W | ++ |
| 649/650 | N85A | ++ |
| 651/652 | A191C | ++ |
| 653/654 | F3C | ++ |
| 655/656 | S204A | ++ |
| 657/658 | L97A | ++ |
| 659/660 | A32G | ++ |
| 661/662 | F3D | ++ |
| 663/664 | I58L | ++ |
| 665/666 | L7I | ++ |
| 667/668 | L25A | ++ |
| 669/670 | A2L | + |
| 671/672 | E78M | + |
| 673/674 | W126G | + |
| 675/676 | K170A | + |
| 677/678 | K201C | + |
| 679/680 | P28T | + |
| 681/682 | N85G | + |
| 683/684 | V51L | + |
| 685/686 | F3K | + |
| 687/688 | E44C | + |
| 689/690 | G57A | + |
| 691/692 | S121L | + |
| 693/694 | P28V | + |
| 695/696 | L7M | + |
| 697/698 | Q49G | + |
| 699/700 | H125R | + |
| 701/702 | I58C | + |
| 703/704 | G63E | + |
| 705/706 | M22A | + |
| 707/708 | R105A | + |
| 709/710 | A35M | + |
| 711/712 | I104T | + |
| 713/714 | G202D | + |
| 715/716 | K100R | + |
| 717/718 | E167D | + |
| 719/720 | H125P | + |
| 721/722 | S19G | + |
| 723/724 | S19C | + |
| 725/726 | A32W | + |
| 727/728 | D77N | + |
| 729/730 | H125C | + |
| 731/732 | S204T | + |
| 733/734 | A98I | + |
| 735/736 | S204L | + |
| 737/738 | V29C | + |
| 739/740 | H125M | + |
| 741/742 | D136A | + |
| 743/744 | K201A | + |
| 745/746 | Q49H | + |
| 747/748 | L97N | + |
| 749/750 | E153D | + |
| 751/752 | E153V | + |
| 753/754 | F3L | + |
| 755/756 | Q49M | + |

Levels of increased activity were determined relative to the reference polypeptide of SEQ ID NO: 450 and defined as follows: “+” 1.12 to 1.17, “++” 1.17 to t 1.24, “+++” 1.24 to 1.44.

### Example 23

### Improvements Over SEQ ID NO: 450 in Conversion to Tetraphosphorylated Nucleotide

### HTP Screening for Improved 3OK Variants

[0360] SEQ ID NO: 450 was selected as the parent 3OK enzyme. Libraries of engineered genes were produced from the parent gene using well-established techniques (e.g., saturation mutagenesis and recombination of previously identified beneficial mutations). The polypeptides encoded by each gene were produced in HTP and prepared as described in Table 23.1.

[0361] Reactions were performed at 2 μL scale in 96-well format 200 μL BioRad PCR plates. Reactions included substrate, LiKAcPO₄, MgCl₂, AcK101, 50% v/v lysate, in Tris-HCl. The reactions were set up as follows: (i) all reaction components except for lysate were pre-mixed in a single solution, and 1 μL of this solution was aliquoted into each well of the 96-well plate; (ii) 1 μL lysate was added to each well. After briefly centrifuging to collect the contents in the bottom of each well, the reaction plates were heat-sealed with a peelable aluminum seal and incubated at 30° C. for indicated hours, then held at 4° C. until the reaction was quenched by 6 μL of MeOH. The reaction mixture was further diluted to 40 μM by water, then coupled with FAM labeled TdT oligo as described in Table 23.1. The reaction plates were heat-sealed with a peelable aluminum seal and incubated at 30° C. for 1 h and 95° C. for 2 min, then held at 4° C. until the reaction was quenched.

[0362] Reactions were quenched and analyzed by CE analysis as described in Example 14.

TABLE 23.1
All lysis, reaction, quench, and analytical properties

Lysis conditions: Lysis buffer - 50 mM Tris-HCl buffer, pH 7.5, 0.1 g/L lysozyme; Lysis buffer
volume - 400 μL; Lysate pre-treatment - Lysates were heat-treated at 65° C. and processed as
described in Example 15. The heat-treated and clarified HTP lysates were used in reactions.
Reaction conditions: Substrate - 10 mM ATP; Reaction buffer - 50 mM Tris-HCl, pH 7.5, 50 mM
LiKAcPO_{4,} 10 mM Magnesium chloride, 0.2 g/L AcK101; Lysate dilution - None; Reaction time -
2 hour
TdT coupling reaction conditions: Substrate - 10 μM SEQ ID NO: 2129, 10 μM above reaction
mixture; Reaction buffer - 20 mM TEoA, pH 7.8, 50 mM CoCl₂, 0.001 U/μL IPP; Enzyme: 4 μM
SEQ ID NO: 2125

[0363] Activity relative to SEQ ID NO: 450 (Activity FIOP) was calculated as the fold-improvement of conversion of the variant divided by the conversion observed in the reaction with SEQ ID NO: 450 (where the conversion may be set as the average of replicates or else the highest single sample as appropriate). Conversion was calculated as 3′PO4 product (SEQ ID NO: 2131) peak areas over the total of the unreacted substrate, byproduct, and 3′PO4 product (SEQ ID NO: 2131) peak areas. The results are shown in Table 23.2.

TABLE 23.2
Relative to SEQ ID NO: 450

| SEQ ID | | Activity FIOP |
|---|---|---|
| NO: | Amino Acid Differences | Conversion Relative to |
| (nt/aa) | (Relative to SEQ ID NO: 450) | SEQ ID NO: 450 |
| 613/614 | W126L | ++ |
| 615/616 | F3V | + |
| 617/618 | A61E | + |
| 621/622 | W126C | + |
| 623/624 | R105K | + |
| 627/628 | W126V | ++ |
| 629/630 | H125Q | + |
| 633/634 | W126A | + |
| 635/636 | I50M | + |
| 653/654 | F3C | + |
| 655/656 | S204A | + |
| 659/660 | A32G | + |
| 665/666 | L7I | + |
| 669/670 | A2L | + |
| 673/674 | W126G | + |
| 679/680 | P28T | + |
| 683/684 | V51L | + |
| 699/700 | H125R | ++ |
| 705/706 | M22A | + |
| 711/712 | I104T | + |
| 713/714 | G202D | ++ |
| 719/720 | H125P | + |
| 725/726 | A32W | +++ |
| 727/728 | D77N | + |
| 729/730 | H125C | +++ |
| 731/732 | S204T | + |
| 733/734 | A98I | + |
| 737/738 | V29C | +++ |
| 747/748 | L97N | +++ |
| 753/754 | F3L | ++ |
| 757/758 | A13D | +++ |
| 759/760 | R142D | +++ |
| 761/762 | A53K | +++ |
| 763/764 | R105L | +++ |
| 765/766 | K170P | +++ |
| 767/768 | A36S | +++ |
| 769/770 | A36G | +++ |
| 771/772 | W196Y | +++ |
| 773/774 | Y47S | +++ |
| 775/776 | Q195P | +++ |
| 777/778 | D173Y | +++ |
| 779/780 | A53E | +++ |
| 781/782 | L199C | ++ |
| 783/784 | Q79G | ++ |
| 785/786 | Q49C | ++ |
| 787/788 | P28D | ++ |
| 789/790 | S204C | ++ |
| 791/792 | K109S | ++ |
| 793/794 | G122I | ++ |
| 795/796 | L25M | ++ |
| 797/798 | R171S | ++ |
| 799/800 | I58T | ++ |
| 801/802 | K201S | ++ |
| 803/804 | E44A | ++ |
| 805/806 | E167T | ++ |
| 807/808 | A53F | ++ |
| 809/810 | F3P | ++ |
| 811/812 | K94A | ++ |
| 813/814 | I50S | ++ |
| 815/816 | L59S | ++ |
| 817/818 | H125Y | ++ |
| 819/820 | T17S | ++ |
| 821/822 | K170G | ++ |
| 823/824 | E152D | ++ |
| 825/826 | Y47K | ++ |
| 827/828 | P28N | ++ |
| 829/830 | G202P | ++ |
| 831/832 | Q49V | ++ |
| 833/834 | K129S | ++ |
| 835/836 | G202I | ++ |
| 837/838 | D197V | ++ |
| 839/840 | K15S | ++ |
| 841/842 | K100S | ++ |
| 843/844 | R105E | ++ |
| 845/846 | N85P | + |
| 847/848 | R142Y | + |
| 849/850 | K94C | + |
| 851/852 | E44D | + |
| 853/854 | T4G | + |
| 855/856 | R171G | + |
| 857/858 | G63S | + |
| 859/860 | R105S | + |
| 861/862 | G57C | + |
| 863/864 | R105G | + |
| 865/866 | G149P | + |
| 867/868 | I50E | + |
| 869/870 | T4V | + |
| 871/872 | R171L | + |
| 873/874 | G55Y | + |
| 875/876 | M22S | + |
| 877/878 | R60V | + |
| 879/880 | D173P | + |
| 881/882 | G202T | + |
| 883/884 | V127C | + |
| 885/886 | E152I | + |
| 887/888 | L199V | + |
| 889/890 | V92T | + |
| 891/892 | G6W | + |
| 893/894 | A2V | + |
| 895/896 | Q195S | + |
| 897/898 | H194G | + |
| 899/900 | G203R | + |
| 901/902 | G26T | + |
| 903/904 | R171T | + |
| 905/906 | V139A | + |
| 907/908 | G203L | + |
| 909/910 | L84P | + |
| 911/912 | A61Y | + |
| 913/914 | A53R | + |
| 915/916 | L7S | + |
| 917/918 | R60L | + |
| 919/920 | R171V | + |
| 921/922 | I5T | + |
| 923/924 | W126M | + |
| 925/926 | A32K | + |
| 927/928 | N85V | + |
| 929/930 | I104C | + |
| 931/932 | I104R | + |
| 933/934 | K109L | + |
| 935/936 | L25V | + |
| 937/938 | G149T | + |
| 939/940 | P56M | + |
| 941/942 | E167I | + |
| 943/944 | I50V | + |
| 945/946 | A191T | + |
| 947/948 | G203A | + |
| 949/950 | H194E | + |
| 951/952 | E44G | + |
| 953/954 | K100I | + |
| 955/956 | V127Y | + |
| 957/958 | K170I | + |
| 959/960 | I5Y | + |
| 961/962 | G149F | + |
| 963/964 | V51T | + |
| 965/966 | G57W | + |
| 967/968 | I104Y | + |
| 969/970 | Y47G | + |
| 971/972 | E101I | + |
| 973/974 | A52I | + |
| 975/976 | G63T | + |
| 977/978 | R60C | + |
| 979/980 | W126P | + |
| 981/982 | I104A | + |
| 983/984 | D197K | + |
| 985/986 | A35S | + |
| 987/988 | G6F | + |
| 989/990 | R105I | + |
| 991/992 | I104G | + |
| 993/994 | R105M | + |
| 995/996 | K170Y | + |
| 997/998 | S204R | + |
| 999/1000 | G149L | + |
| 1001/1002 | D136F | + |
| 1003/1004 | L199T | + |
| 1005/1006 | G6C | + |
| 1007/1008 | G149K | + |
| 1009/1010 | P56E | + |
| 1011/1012 | D173H | + |
| 1013/1014 | K170C | + |
| 1015/1016 | E153S | + |
| 1017/1018 | M22E | + |
| 1019/1020 | E44P | + |
| 1021/1022 | D173V | + |
| 1023/1024 | K109R | + |
| 1025/1026 | G63I | + |

Levels of increased activity were determined relative to the reference polypeptide of SEQ ID NO: 450 and defined as follows: “+” 1.1 to 1.2, “++” 1.2 to 1.5, “+++” 1.5 to 3.1.

### Example 24

### Improvements Over SEQ ID NO: 496 in Conversion to Tetraphosphorylated Nucleotide

### HTP Screening for Improved 3OK Variants

[0364] SEQ ID NO: 496 was selected as the parent 3OK enzyme. Libraries of engineered genes were produced from the parent gene using well-established techniques (e.g., saturation mutagenesis and recombination of previously identified beneficial mutations). The polypeptides encoded by each gene were produced in HTP and prepared as described in Table 24.1.

[0365] Reactions were performed at 2 μL scale in 96-well format 200 μL BioRad PCR plates. Reactions included substrate, LiKAcPO₄, MgCl₂, AcK101, 50% v/v lysate, in Tris-HCl. The reactions were set up as follows: (i) all reaction components except for lysate were pre-mixed in a single solution, and 1 μL of this solution was aliquoted into each well of the 96-well plate; (ii) 1 μL lysate was added to each well. After briefly centrifuging to collect the contents in the bottom of each well, the reaction plates were heat-sealed with a peelable aluminum seal and incubated at 30° C. for indicated hours, then held at 4° C. until the reaction was quenched by 6 μL of MeOH. The reaction mixture was further diluted to 40 μM by water, then coupled with FAM labeled TdT oligo as described in Table 24.1. The reaction plates were heat-sealed with a peelable aluminum seal and incubated at 30° C. for 1 h and 95° C. for 2 min, then held at 4 RC until the reaction was quenched.

[0366] Reactions were quenched and analyzed by CE analysis as described in Example 14.

TABLE 24.1
All lysis, reaction, quench, and analytical properties

Lysis conditions: Lysis buffer - 50 mM Tris-HCl buffer, pH 7.5, 0.1 g/L lysozyme; Lysis buffer
volume - 400 μL; Lysate pre-treatment - Lysates were heat-treated at 63° C. and processed as
described in Example 15. The heat-treated and clarified HTP lysates were used in reactions.
Reaction conditions: Substrate - 10 mM ATP; Reaction buffer - 50 mM Tris-HCl, pH 7.5, 50 mM
LiKAcPO_{4,} 10 mM Magnesium chloride, 0.2 g/L AcK101; Lysate dilution - None; Reaction time -
16 hour
TdT coupling reaction conditions: Substrate - 10 μM SEQ ID NO: 2129, 10 μM above reaction
mixture; Reaction buffer - 20 mM TEoA, pH 7.8, 50 mM CoCl₂, 0.001 U/μL IPP; Enzyme: 4 μM
SEQ ID NO: 2125

[0367] Activity relative to SEQ ID NO: 496 (Activity FIOP) was calculated as the fold-improvement of conversion of the variant divided by the conversion observed in the reaction with SEQ ID NO: 496 (where the conversion may be set as the average of replicates or else the highest single sample as appropriate). Conversion was calculated as 3′PO4 product (SEQ ID NO: 2131) peak areas over the total of the unreacted substrate, byproduct, and 3′PO4 product (SEQ ID NO: 2131) peak areas. The results are shown in Table 24.2.

TABLE 24.2
Relative to SEQ ID NO: 496

| SEQ ID | | Activity FIOP |
|---|---|---|
| NO: | Amino Acid Differences | Conversion Relative to |
| (nt/aa) | (Relative to SEQ ID NO: 496) | SEQ ID NO: 496 |
| 1027/1028 | S86A/W126L/V135D/R142K | +++ |
| 1029/1030 | F3V/Q49D/A61E/T124Q/H125Q/R171M/G200D | +++ |
| 1031/1032 | I50V/A91E/W126V/V135D | +++ |
| 1033/1034 | F3V/Q49D/A61E/R81L/T124Q/H125Q/G200D | +++ |
| 1035/1036 | F3V/Q49D/A61E/R81L/T124Q/H125S/G200D | +++ |
| 1037/1038 | A72Q/S86A/A91E/L97N/V135D | +++ |
| 1039/1040 | A61E/T124S/H125S/A166E/R171M/G200D | +++ |
| 1041/1042 | F3V/Q49D/R105K/T124Q/H125S/G200D | ++ |
| 1043/1044 | F3V/Q49D/T124Q/H125Q/A166I/R171M/G200D | ++ |
| 1045/1046 | F3V/A61E/R81L/H125S/A166I/R171M/G200D | ++ |
| 1047/1048 | F3V/A61E/R81L/R105K/T124Q/H125S/A166I/R171M | ++ |
| 1049/1050 | A61E/V83M/T124Q/H125S/G200D | ++ |
| 1051/1052 | A61E/R81L/H125S/A166E/R171M/G200D | ++ |
| 1053/1054 | K94A/W126L | ++ |
| 1055/1056 | Q49D/V111I/T124Q/A166E/R171M/G200D | ++ |
| 1057/1058 | Q49D/A61E/T124Q/H125S/A166I/R171M | ++ |
| 1059/1060 | F3V/Q49D/A61E/V83M/G200D | ++ |
| 1061/1062 | S86A/K94A/V111I/W126L/R142K | ++ |
| 1063/1064 | A61E/G200D | + |
| 1065/1066 | F3V/R81L/T124S/H125S/G200D | + |
| 1067/1068 | Q49D/A61E/V83M/R105K/T124S/H125S/R171M | + |
| 1069/1070 | A61E/R81L/V83M/A166I/R171M/G200D | + |
| 1071/1072 | F3V/Q49D/R81L/T124Q/H125Q/A166E/R171M | + |
| 1073/1074 | F3V/Q49D/A61E/V83M/H125S/A166E | + |
| 1075/1076 | A61E/H125Q | + |
| 1077/1078 | F3V/A166E/R171M | + |
| 1079/1080 | Q49D/A61E/H125S/R171M | + |
| 1081/1082 | K82E/V83M | + |
| 1083/1084 | F3V/R81L/R105K/T124Q/A166I | + |
| 1085/1086 | A61E/A166E | + |
| 1087/1088 | V83M/R105K/T124S/H125S/A166I/G200D | + |
| 1089/1090 | F3V/Q49D/A61E/R81L/V83M/T124S/H125S/A166I/R171M | + |
| 1091/1092 | Q49D/A61E/V83M/T124S/H125S/R171M | + |
| 1093/1094 | A72Q/R142K/I182E | + |
| 1095/1096 | Q49D/T124Q/H125Q/A166I | + |
| 1097/1098 | F3V/Q49D/R81L/V83M/T124S/H125S/G200D | + |
| 1099/1100 | W126V | + |
| 1101/1102 | F3V/Q49D/R81L/V83M/T124Q/H125S/R171M | + |
| 1103/1104 | G200D | + |
| 1105/1106 | K82E/V83M/H103F | + |
| 1107/1108 | A72Q/K82E/V83M/R142K/N181T/D191A/G200N | + |
| 1109/1110 | I182E | + |
| 1111/1112 | F3V/Q49D/A166E/R171M | + |
| 1113/1114 | F3V/Q49D/A61E/V83M | + |
| 1115/1116 | F3V/V83M/A166I/R171M | + |
| 1117/1118 | T124Q/H125S | + |
| 1119/1120 | R142K | + |
| 1121/1122 | Q49D/V83M/R105K/V111I/T124Q | + |
| 1123/1124 | Q49D/A61E/R81L/V83M | + |
| 1125/1126 | I50V/R60L/K82E/V83M/H103M/W126L/R142K/V175W/D191A | + |
| 1127/1128 | V83M/A91E/K94A/K95I/W126L/V135D/D191A | + |
| 1129/1130 | R60L/I182E | + |
| 1131/1132 | V83M/R105K/A166E | + |
| 1133/1134 | Q49D/V83M/R105K/T124Q/H125Q/A166I | + |
| 1135/1136 | R105K | + |
| 1137/1138 | V111I/W126V/V135D/V175W/I182E | + |
| 1139/1140 | V83M/H125S/R171M | + |
| 1141/1142 | I50V/R60L/A72Q/S86A/H103L | + |

Levels of increased activity were determined relative to the reference polypeptide of SEQ ID NO: 496 and defined as follows: “+” 1.1 to 2.7, “++” 2.7 to 5.0, “+++” 5.0 o 14.9.

### Example 25

### Improvements Over SEQ ID NO: 496 in Conversion to Tetraphosphorylated Nucleotide

### HTP Screening for Improved 3OK Variants

[0368] SEQ ID NO: 496 was selected as the parent 3OK enzyme. Libraries of engineered genes were produced from the parent gene using well-established techniques (e.g., saturation mutagenesis and recombination of previously identified beneficial mutations). The polypeptides encoded by each gene were produced in HTP and prepared as described in Table 25.1.

[0369] Reactions were performed at 2 μL scale in 96-well format 200 μL BioRad PCR plates. Reactions included substrate, LiKAcPO₄, MgCl₂, AcK101, 50% v/v lysate, in Tris-HCl. The reactions were set up as follows: (i) all reaction components except for lysate were pre-mixed in a single solution, and 1 μL of this solution was aliquoted into each well of the 96-well plate; (ii) 1 μL lysate was added to each well. After briefly centrifuging to collect the contents in the bottom of each well, the reaction plates were heat-sealed with a peelable aluminum seal and incubated at 30° C. for indicated hours, then held at 4° C. until the reaction was quenched by 6 μL of MeOH. The reaction mixture was further diluted to 40 μM by water, then coupled with FAM labeled TdT oligo as described in Table 25.1. The reaction plates were heat-sealed with a peelable aluminum seal and incubated at 30° C. for 1 h and 95° C. for 2 min, then held at 4° C. until the reaction was quenched.

[0370] Reactions were quenched and analyzed by CE analysis as described in Example 14.

TABLE 25.1
All lysis, reaction, quench, and analytical properties

Lysis conditions: Lysis buffer - 50 mM Tris-HCl buffer, pH 7.5, 0.1 g/L lysozyme; Lysis buffer
volume - 400 μL; Lysate pre-treatment - Lysates were heat-treated at 50° C. and processed as
described in Example 15. The heat-treated and clarified HTP lysates were used in reactions.
Reaction conditions: Substrate - 1 mM CTP; Reaction buffer - 50 mM Tris-HCl, pH 7.5, 50 mM
LiKAcPO_{4,} 10 mM Magnesium chloride, 0.2 g/L AcK101; Lysate dilution - None; Reaction time -
16 hour
TdT coupling reaction conditions: Substrate - 10 μM SEQ ID NO: 2129, 10 μM above reaction
mixture; Reaction buffer - 20 mM TEoA, pH 7.8, 50 mM CoCl₂, 0.001 U/μL IPP; Enzyme: 4 μM
SEQ ID NO: 2125

[0371] Activity relative to SEQ ID NO: 496 (Activity FIOP) was calculated as the fold-improvement of conversion of the variant divided by the conversion observed in the reaction with SEQ ID NO: 496 (where the conversion may be set as the average of replicates or else the highest single sample as appropriate). Conversion was calculated as 3′PO4 product (SEQ ID NO: 2133) peak areas over the total of the unreacted substrate, byproduct, and 3′PO4 product (SEQ ID NO: 2133) peak areas. The results are shown in Table 25.2.

TABLE 25.2
Relative to SEQ ID NO: 496

| SEQ ID | | Activity FIOP |
|---|---|---|
| NO: | Amino Acid Differences | Conversion Relative to |
| (nt/aa) | (Relative to SEQ ID NO: 496) | SEQ ID NO: 496 |
| 1041/1042 | F3V/Q49D/R105K/T124Q/H125S/ | + |
| | G200D | |
| 1059/1060 | F3V/Q49D/A61E/V83M/G200D | + |
| 1099/1100 | W126V | ++ |
| 1107/1108 | A72Q/K82E/V83M/R142K/N181T/ | +++ |
| | D191A/G200N | |
| 1119/1120 | R142K | + |
| 1143/1144 | D191A/G200D | ++ |

Levels of increased activity were determined relative to the reference polypeptide of SEQ ID NO: 496 and defined as follows: “+” 1.06 to 1.11, “++” 1.1 to 1.15, “+++” 1.15 to 1.15.

### Example 26

### Improvements Over SEQ ID NO: 1042 in Conversion to Tetraphosphorylated Nucleotide

### HTP Screening for Improved 3OK Variants

[0372] SEQ ID NO: 1042 was selected as the parent 3OK enzyme. Libraries of engineered genes were produced from the parent gene using well-established techniques (e.g., saturation mutagenesis and recombination of previously identified beneficial mutations). The polypeptides encoded by each gene were produced in HTP and prepared as described in Table 26.1.

[0373] Reactions were performed at 2 μL scale in 96-well format 200 μL BioRad PCR plates. Reactions included substrate, LiKAcPO₄, MgCl₂, AcK101, 50% v/v lysate, in Tris-HCl. The reactions were set up as follows: (i) all reaction components except for lysate were pre-mixed in a single solution, and 1 μL of this solution was aliquoted into each well of the 96-well plate; (ii) 1 μL lysate was added to each well. After briefly centrifuging to collect the contents in the bottom of each well, the reaction plates were heat-sealed with a peelable aluminum seal and incubated at 30° C. for indicated hours, then held at 4° C. until the reaction was quenched by 6 μL of MeOH. The reaction mixture was further diluted to 40 μM by water, then coupled with FAM labeled TdT oligo as described in Table 26.1. The reaction plates were heat-sealed with a peelable aluminum seal and incubated at 30° C. for 1 h and 95° C. for 2 min, then held at 4° C. until the reaction was quenched.

[0374] Reactions were quenched and analyzed by CE analysis as described in Example 14

TABLE 26.1
All lysis, reaction, quench, and analytical properties

Lysis conditions: Lysis buffer - 50 mM Tris-HCl buffer, pH 7.5, 0.1 g/L lysozyme; Lysis buffer
volume - 400 μL; Lysate pre-treatment - Lysates were heat-treated at 65° C. and processed as
described in Example 15. The heat-treated and clarified HTP lysates were used in reactions.
Reaction conditions: Substrate - 10 mM ATP; Reaction buffer - 50 mM Tris-HCl, pH 7.5, 50 mM
LiKAcPO_{4,} 10 mM Magnesium chloride, 0.2 g/L AcK101; Lysate dilution - None; Reaction time -
16 hour
TdT coupling reaction conditions: Substrate - 10 μM SEQ ID NO: 2129, 10 μM above reaction
mixture; Reaction buffer - 20 mM TEoA, pH 7.8, 50 mM CoCl₂, 0.001 U/μL IPP; Enzyme: 4 μM
SEQ ID NO: 2125

[0375] Activity relative to SEQ ID NO: 1042 (Activity FIOP) was calculated as the fold-improvement of conversion of the variant divided by the conversion observed in the reaction with SEQ ID NO: 1042 (where the conversion may be set as the average of replicates or else the highest single sample as appropriate). Conversion was calculated as 3′PO4 product (SEQ ID NO: 2131) peak areas over the total of the unreacted substrate, byproduct, and 3′PO4 product (SEQ ID NO: 2131) peak areas. The results are shown in Table 26.2.

TABLE 26.2
Relative to SEQ ID NO: 1042

| SEQ ID | | Activity FIOP |
|---|---|---|
| NO: | Amino Acid Differences | Conversion Relative to |
| (nt/aa) | (Relative to SEQ ID NO: 1042) | SEQ ID NO: 1042 |
| 1145/1146 | N85A | +++ |
| 1147/1148 | K105G/K201H | +++ |
| 1149/1150 | R171M/K201S | +++ |
| 1151/1152 | A61E | +++ |
| 1153/1154 | Q79G/W126M/S204C | ++ |
| 1155/1156 | N85R/L97N | ++ |
| 1157/1158 | A35M/I50E | ++ |
| 1159/1160 | A13D | ++ |
| 1161/1162 | L7I/N85G/L97A/W126M | ++ |
| 1163/1164 | A53E/I58T/K100R/K105G/K109S | ++ |
| 1165/1166 | I50M/E78A/R142D | + |
| 1167/1168 | L7I | + |
| 1169/1170 | S19G/K100R/K105L/K201H | + |
| 1171/1172 | K100R | + |
| 1173/1174 | W126M | + |
| 1175/1176 | S19G/A53N/K105G | + |
| 1177/1178 | A53N/I58T/K109S/K201S | + |
| 1179/1180 | A53E/K100W/K105G | + |
| 1181/1182 | S204M | + |
| 1183/1184 | L97A | + |
| 1185/1186 | L7S/A61E/N85R/L97A/W126M | + |
| 1187/1188 | W126A | + |
| 1189/1190 | S19G | + |
| 1191/1192 | A32W/N85R/W126G/S204C | + |
| 1193/1194 | S19G/A53N/K201H | + |
| 1195/1196 | Q79G | + |

Levels of increased activity were determined relative to the reference polypeptide of SEQ ID NO: 1042 and defined as follows: “+” 1.1 to 1.4, “++” 1.4 to 1.7, “+++” 1.7 to 2.0.

### Example 27

### Improvements Over SEQ ID NO: 1042 in Conversion to Tetraphosphorylated Nucleotide

### HTP Screening for Improved 3OK Variants

[0376] SEQ ID NO: 1042 was selected as the parent 3OK enzyme. Libraries of engineered genes were produced from the parent gene using well-established techniques (e.g., saturation mutagenesis and recombination of previously identified beneficial mutations). The polypeptides encoded by each gene were produced in HTP and prepared as described in Table 27.1.

[0377] Reactions were performed at 2 μL scale in 96-well format 200 μL BioRad PCR plates. Reactions included substrate, LiKAcPO₄, MgCl₂, Ack101, 50% v/v lysate, in Tris-HCL. The reactions were set up as follows: (i) all reaction components except for lysate were pre-mixed in a single solution, and 1 μL of this solution was aliquoted into each well of the 96-well plate; (ii) 1 μL lysate was added to each well. After briefly centrifuging to collect the contents in the bottom of each well, the reaction plates were heat-sealed with a peelable aluminum seal and incubated at 30° C. for indicated hours, then held at 4° C. until the reaction was quenched by 6 μL of MeOH. The reaction mixture was further diluted to 40 μM by water, then coupled with FAM labeled TdT oligo as described in Table 27.1. The reaction plates were heat-sealed with a peelable aluminum seal and incubated at 30° C. for 1 h and 95° C. for 2 min, then held at 4° C. until the reaction was quenched.

[0378] Reactions were quenched and analyzed by CE analysis as described in Example 14.

TABLE 27.1
All lysis, reaction, quench, and analytical properties

Lysis conditions: Lysis buffer - 50 mM Tris-HCl buffer, pH 7.5, 0.1 g/L lysozyme; Lysis buffer
volume - 400 μL; Lysate pre-treatment - Lysates were heat-treated at 50° C. and processed as
described in Example 15. The heat-treated and clarified HTP lysates were used in reactions.
Reaction conditions: Substrate - 1 mM UTP; Reaction buffer - 50 mM Tris-HCl, pH 7.5, 50 mM
LiKAcPO_{4,} 10 mM Magnesium chloride, 0.2 g/L AcK101; Lysate dilution - None; Reaction time -
16 hour
TdT coupling reaction conditions: Substrate - 10 μM SEQ ID NO: 2129, 10 μM above reaction
mixture; Reaction buffer - 20 mM TEoA, pH 7.8, 50 mM CoCl₂, 0.001 U/μL IPP; Enzyme: 4 μM
SEQ ID NO: 2125

[0379] Activity relative to SEQ ID NO: 1042 (Activity FIOP) was calculated as the fold-improvement of conversion of the variant divided by the conversion observed in the reaction with SEQ ID NO: 1042 (where the conversion may be set as the average of replicates or else the highest single sample as appropriate). Conversion was calculated as 3′PO4 product (SEQ ID NO: 2134) peak areas over the total of the unreacted substrate, byproduct, and 3′PO4 product (SEQ ID NO: 2134) peak areas. The results are shown in Table 27.2.

TABLE 27.2
Relative to SEQ ID NO: 1042

| SEQ ID | | Activity FIOP |
|---|---|---|
| NO: | Amino Acid Differences | Conversion Relative to |
| (nt/aa) | (Relative to SEQ ID NO: 1042) | SEQ ID NO: 1042 |
| 1145/1146 | N85A | + |
| 1155/1156 | N85R/L97N | + |
| 1179/1180 | A53E/K100W/K105G | + |
| 1191/1192 | A32W/N85R/W126G/S204C | +++ |
| 1197/1198 | A36R/A61E/W126M/S204C | +++ |
| 1199/1200 | P28T/A32W/N85R | ++ |
| 1201/1202 | A32W/A36G/W126M | ++ |
| 1203/1204 | P28T/A36R/A61E | ++ |
| 1205/1206 | P28T/A32W/L97A/W126M | + |
| 1207/1208 | A32W/A36G/A61E/N85G/L97N/ | + |
| | W126M/S204C | |
| 1209/1210 | K100W/K105A | + |
| 1211/1212 | P28T/A32W/A61E | + |
| 1213/1214 | N85R/W126M | + |
| 1215/1216 | P28T/A32W/G71V/Q79G/L97A/ | + |
| | W126M/S204C | |
| 1217/1218 | K100W/K105G | + |
| 1219/1220 | L7I/P28T/A32W/L97N | + |
| 1221/1222 | L7I/A61E | + |

Levels of increased activity were determined relative to the reference polypeptide of SEQ ID NO: 1042 and defined as follows: “+” 1.1 to 1.3, “++” 1.3 to 1.6, “+++” 1.6 to 2.2.

### Example 28

### Improvements Over SEQ ID NO: 1042 in Conversion to Tetraphosphorylated Nucleotide

### HTP Screening for Improved 3OK Variants

[0380] SEQ ID NO: 1042 was selected as the parent 3OK enzyme. Libraries of engineered genes were produced from the parent gene using well-established techniques (e.g., saturation mutagenesis and recombination of previously identified beneficial mutations). The polypeptides encoded by each gene were produced in HTP and prepared as described in Table 28.1.

[0381] Reactions were performed at 2 μL scale in 96-well format 200 μL BioRad PCR plates. Reactions included substrate, LiKAcPO₄, MgCl₂, AcK101, 50% v/v lysate, in Tris-HCl. The reactions were set up as follows: (i) all reaction components except for lysate were pre-mixed in a single solution, and 1 μL of this solution was aliquoted into each well of the 96-well plate; (ii) 1 μL lysate was added to each well. After briefly centrifuging to collect the contents in the bottom of each well, the reaction plates were heat-sealed with a peelable aluminum seal and incubated at 30° C. for indicated hours, then held at 4° C. until the reaction was quenched by 6 μL of MeOH. The reaction mixture was further diluted to 40 μM by water, then coupled with FAM labeled TdT oligo as described in Table 28.1. The reaction plates were heat-sealed with a peelable aluminum seal and incubated at 30° C. for 1 h and 95° C. for 2 min, then held at 4° C. until the reaction was quenched.

[0382] Reactions were quenched and analyzed by CE analysis as described in Example 14.

TABLE 28.1
All lysis, reaction, quench, and analytical properties

Lysis conditions: Lysis buffer - 50 mM Tris-HCl buffer, pH 7.5, 0.1 g/L lysozyme; Lysis buffer
volume - 400 μL; Lysate pre-treatment - Lysates were heat-treated at 65° C. and processed as
described in Example 15. The heat-treated and clarified HTP lysates were used in reactions.
Reaction conditions: Substrate - 10 mM ATP; Reaction buffer - 50 mM Tris-HCl, pH 7.5, 50 mM
LiKAcPO_{4,} 10 mM Magnesium chloride, 0.2 g/L AcK101; Lysate dilution - None; Reaction time -
16 hour
TdT coupling reaction conditions: Substrate - 10 μM SEQ ID NO: 2129, 10 μM above reaction
mixture; Reaction buffer - 20 mM TEoA, pH 7.8, 50 mM CoCl₂, 0.001 U/μL IPP; Enzyme: 4 μM
SEQ ID NO: 2125

[0383] Activity relative to SEQ ID NO: 1042 (Activity FIOP) was calculated as the fold-improvement of conversion of the variant divided by the conversion observed in the reaction with SEQ ID NO: 1042 (where the conversion may be set as the average of replicates or else the highest single sample as appropriate). Conversion was calculated as 3′PO4 product (SEQ ID NO: 2131) peak areas over the total of the unreacted substrate, byproduct, and 3′PO4 product (SEQ ID NO: 2131) peak areas. The results are shown in Table 28.2.

TABLE 28.2
Relative to SEQ ID NO: 1042

| SEQ ID | | Activity FIOP |
|---|---|---|
| NO: | Amino Acid Differences | Conversion Relative to |
| (nt/aa) | (Relative to SEQ ID NO: 1042) | SEQ ID NO: 1042 |
| 1223/1224 | R74F | +++ |
| 1225/1226 | G71A | +++ |
| 1227/1228 | A146D | +++ |
| 1229/1230 | S161V | ++ |
| 1231/1232 | I115W | ++ |
| 1233/1234 | K69R | ++ |
| 1235/1236 | I176G | ++ |
| 1237/1238 | R160L | ++ |
| 1239/1240 | I176L | ++ |
| 1241/1242 | G71I | ++ |
| 1243/1244 | I182E | ++ |
| 1245/1246 | R74I | + |
| 1247/1248 | G71T | + |
| 1249/1250 | G71Y/L131I | + |
| 1251/1252 | S165I | + |
| 1253/1254 | H103F | + |
| 1255/1256 | L141P | + |
| 1257/1258 | A146T | + |
| 1259/1260 | A146S | + |
| 1261/1262 | Y134L | + |
| 1263/1264 | Q124H | + |
| 1265/1266 | L93T | + |
| 1267/1268 | I115V | + |
| 1269/1270 | K95S | + |
| 1271/1272 | L156P | + |
| 1273/1274 | R158H | + |
| 1275/1276 | S165Q | + |
| 1277/1278 | R23A | + |
| 1279/1280 | D62G | + |
| 1281/1282 | K157M | + |
| 1283/1284 | A72N | + |
| 1285/1286 | L27F | + |
| 1287/1288 | H103V | + |
| 1289/1290 | A72D | + |
| 1291/1292 | L117G | + |
| 1293/1294 | L141I | + |
| 1295/1296 | I182C | + |
| 1297/1298 | A72T | + |
| 1299/1300 | A72K | + |
| 1301/1302 | F150L | + |
| 1303/1304 | R74G | + |
| 1305/1306 | H103M | + |
| 1307/1308 | R160D | + |
| 1309/1310 | R67F | + |
| 1311/1312 | Y134H | + |
| 1313/1314 | L27Y | + |
| 1315/1316 | A166E | + |
| 1317/1318 | A166L | + |
| 1319/1320 | K157E | + |

Levels of increased activity were determined relative to the reference polypeptide of SEQ ID NO: 1042 and defined as follows: “+” 1.1 to 1.8, “++” 1.8 to 3.4, “+++” 3.4 to 10.79.

### Example 29

### Improvements Over SEQ ID NO: 1042 in Conversion to Tetraphosphorylated Nucleotide

### HTP Screening for Improved 3OK Variants

[0384] SEQ ID NO: 1042 was selected as the parent 3OK enzyme. Libraries of engineered genes were produced from the parent gene using well-established techniques (e.g., saturation mutagenesis and recombination of previously identified beneficial mutations). The polypeptides encoded by each gene were produced in HTP and prepared as described in Table 29.1.

[0385] Reactions were performed at 2 μL scale in 96-well format 200 μL BioRad PCR plates. Reactions included substrate, LiKAcPO₄, MgCl₂, AcK101, 50% v/v lysate, in Tris-HCl. The reactions were set up as follows: (i) all reaction components except for lysate were pre-mixed in a single solution, and 1 μL of this solution was aliquoted into each well of the 96-well plate; (ii) 1 μL lysate was added to each well. After briefly centrifuging to collect the contents in the bottom of each well, the reaction plates were heat-sealed with a peelable aluminum seal and incubated at 30° C. for indicated hours, then held at 4° C. until the reaction was quenched by 6 μL of MeOH. The reaction mixture was further diluted to 40 μM by water, then coupled with FAM labeled TdT oligo as described in Table 29.1. The reaction plates were heat-sealed with a peelable aluminum seal and incubated at 30° C. for 1 h and 95° C. for 2 min, then held at 4° C. until the reaction was quenched.

[0386] Reactions were quenched and analyzed by CE analysis as described in Example 14.

TABLE 29.1
All lysis, reaction, quench, and analytical properties

Lysis conditions: Lysis buffer - 50 mM TEoA buffer, pH 7.5, 0.1 g/L lysozyme; Lysis buffer
volume - 400 μL; Lysate pre-treatment - Lysates were heat-treated at 65° C. and processed as
described in Example 15. The heat-treated and clarified HTP lysates were used in reactions.
Reaction conditions: Substrate - 10 mM ATP; Reaction buffer - 50 mM Tris-HCl, pH 7.5, 50 mM
LiKAcPO_{4,} 10 mM Magnesium chloride, 0.2 g/L AcK101; Lysate dilution - None; Reaction time -
3 hour
TdT coupling reaction conditions: Substrate - 10 μM SEQ ID NO: 2129, 10 μM above reaction
mixture; Reaction buffer - 20 mM TEoA, pH 7.8, 50 mM CoCl₂, 0.001 U/μL IPP; Enzyme: 4 μM
SEQ ID NO: 2125

[0387] Activity relative to SEQ ID NO: 1042 (Activity FIOP) was calculated as the fold-improvement of conversion of the variant divided by the conversion observed in the reaction with SEQ ID NO: 1042 (where the conversion may be set as the average of replicates or else the highest single sample as appropriate). Conversion was calculated as 3′PO4 product (SEQ ID NO: 2131) peak areas over the total of the unreacted substrate, byproduct, and 3′PO4 product (SEQ ID NO: 2131) peak areas. The results are shown in Table 29.2.

TABLE 29.2
Relative to SEQ ID NO: 1042

| SEQ ID | | Activity FIOP |
|---|---|---|
| NO: | Amino Acid Differences | Conversion Relative to |
| (nt/aa) | (Relative to SEQ ID NO: 1042) | SEQ ID NO: 1042 |
| 1223/1224 | R74F | +++ |
| 1225/1226 | G71A | + |
| 1243/1244 | I182E | + |
| 1245/1246 | R74I | + |
| 1247/1248 | G71T | + |
| 1251/1252 | S165I | ++ |
| 1267/1268 | I115V | + |
| 1275/1276 | S165Q | + |
| 1281/1282 | K157M | + |
| 1285/1286 | L27F | + |
| 1289/1290 | A72D | ++ |
| 1301/1302 | F150L | ++ |
| 1305/1306 | H103M | + |
| 1321/1322 | R74C | +++ |
| 1323/1324 | R74V | +++ |
| 1325/1326 | R74A | +++ |
| 1327/1328 | G71Q | ++ |
| 1329/1330 | H103L | + |
| 1331/1332 | Q68G | + |
| 1333/1334 | A20T | + |
| 1335/1336 | Q124Y | + |
| 1337/1338 | M96I | + |
| 1339/1340 | G71R | + |
| 1341/1342 | I192L | + |
| 1343/1344 | N181T | + |
| 1345/1346 | T110A | + |
| 1347/1348 | G89L | + |
| 1349/1350 | R160E | + |
| 1351/1352 | K41A | + |
| 1353/1354 | G71V | + |

Levels of increased activity were determined relative to the reference polypeptide of SEQ ID NO: 1042 and defined as follows: “+” 1.1 to 1.5, “++” 1.5 to 1.9, “+++” 1.9 to 2.9.

### Example 30

### Improvements Over SEQ ID NO: 1042 in Conversion to Tetraphosphorylated Nucleotide

### HTP Screening for Improved 3OK Variants

[0388] SEQ ID NO: 1042 was selected as the parent 3OK enzyme. Libraries of engineered genes were produced from the parent gene using well-established techniques (e.g., saturation mutagenesis and recombination of previously identified beneficial mutations). The polypeptides encoded by each gene were produced in HTP and prepared as described in Table 30.1.

[0389] Reactions were performed at 2 μL scale in 96-well format 200 μL BioRad PCR plates. Reactions included substrate, LiKAcPO₄, MgCl₂, AcK101, 50% v/v lysate, in Tris-HCl. The reactions were set up as follows: (i) all reaction components except for lysate were pre-mixed in a single solution, and 1 μL of this solution was aliquoted into each well of the 96-well plate; (ii) 1 μL lysate was added to each well. After briefly centrifuging to collect the contents in the bottom of each well, the reaction plates were heat-sealed with a peelable aluminum seal and incubated at 30° C. for indicated hours, then held at 4° C. until the reaction was quenched by 6 μL of MeOH. The reaction mixture was further diluted to 40 μM by water, then coupled with FAM labeled TdT oligo as described in Table 30.1. The reaction plates were heat-sealed with a peelable aluminum seal and incubated at 30° C. for 1 h and 95° C. for 2 min, then held at 4° C. until the reaction was quenched.

[0390] Reactions were quenched and analyzed by CE analysis as described in Example 14.

TABLE 30.1
All lysis, reaction, quench, and analytical properties

Lysis conditions: Lysis buffer - 50 mM TEoA buffer, pH 7.5, 0.1 g/L lysozyme; Lysis buffer
volume - 400 μL; Lysate pre-treatment - Lysates were heat-treated at 55° C. and processed as
described in Example 15. The heat-treated and clarified HTP lysates were used in reactions.
Reaction conditions: Substrate - 1 mM fATP; Reaction buffer - 50 mM Tris-HCl, pH 7.5, 50 mM
LiKAcPO_{4,} 10 mM Magnesium chloride, 0.2 g/L AcK101; Lysate dilution - None; Reaction time -
3 hour
TdT coupling reaction conditions: Substrate - 10 μM SEQ ID NO: 2129, 10 μM above reaction
mixture; Reaction buffer - 20 mM TEoA, pH 7.8, 50 mM CoCl₂, 0.001 U/μL IPP; Enzyme: 4 μM
SEQ ID NO: 2125

[0391] Activity relative to SEQ ID NO: 1042 (Activity FIOP) was calculated as the fold-improvement of conversion of the variant divided by the conversion observed in the reaction with SEQ ID NO: 1042 (where the conversion may be set as the average of replicates or else the highest single sample as appropriate). Conversion was calculated as 3′P04 product (SEQ ID NO: 2135) peak areas over the total of the unreacted substrate, byproduct, and 3′PO4 product (SEQ ID NO: 2135) peak areas. The results are shown in Table 30.2.

TABLE 30.2
Relative to SEQ ID NO: 1042

| SEQ ID | | Activity FIOP |
|---|---|---|
| NO: | Amino Acid Differences | Conversion Relative to |
| (nt/aa) | (Relative to SEQ ID NO: 1042) | SEQ ID NO: 1042 |
| 1229/1230 | S161V | ++ |
| 1231/1232 | I115W | + |
| 1239/1240 | I176L | + |
| 1253/1254 | H103F | ++ |
| 1291/1292 | L117G | + |
| 1303/1304 | R74G | + |
| 1333/1334 | A20T | + |
| 1355/1356 | R160K | +++ |
| 1357/1358 | W163V | ++ |
| 1359/1360 | H103C | ++ |
| 1361/1362 | Q124A | ++ |
| 1363/1364 | A20C | ++ |
| 1365/1366 | K95Y | ++ |
| 1367/1368 | V130Q | + |
| 1369/1370 | V39C | + |
| 1371/1372 | V175W | + |
| 1373/1374 | I11K | + |
| 1375/1376 | R160S | + |
| 1377/1378 | A146H | + |
| 1379/1380 | E64R | + |
| 1381/1382 | V135F | + |
| 1383/1384 | K95H | + |
| 1385/1386 | E64V | + |
| 1387/1388 | A72L | + |
| 1389/1390 | N148V | + |
| 1391/1392 | I182P | + |
| 1393/1394 | N181V | + |
| 1395/1396 | G10S | + |
| 1397/1398 | M96T | + |
| 1399/1400 | N178M | + |
| 1401/1402 | A38S | + |

Levels of increased activity were determined relative to the reference polypeptide of SEQ ID NO: 1042 and defined as follows: “+” 1.1 to 1.3, “++” 1.3 to 1.6, “+++” 1.6 to 3.0.

### Example 31

### Improvements Over SEQ ID NO: 1180 in Conversion to Tetraphosphorylated Nucleotide

### HTP Screening for Improved 3OK Variants

[0392] SEQ ID NO: 1180 was selected as the parent 3OK enzyme. Libraries of engineered genes were produced from the parent gene using well-established techniques (e.g., saturation mutagenesis and recombination of previously identified beneficial mutations). The polypeptides encoded by each gene were produced in HTP and prepared as described in Table 31.1.

[0393] Reactions were performed at 2 μL scale in 96-well format 200 μL BioRad PCR plates. Reactions included substrate, LiKAcPO₄, MgCl₂, AcK101, 50% v/v lysate, in Tris-HCl. The reactions were set up as follows: (i) all reaction components except for lysate were pre-mixed in a single solution, and 1 μL of this solution was aliquoted into each well of the 96-well plate; (ii) 1 μL lysate was added to each well. After briefly centrifuging to collect the contents in the bottom of each well, the reaction plates were heat-sealed with a peelable aluminum seal and incubated at 30° C. for indicated hours, then held at 4° C. until the reaction was quenched by 6 μL of MeOH. The reaction mixture was further diluted to 40 μM by water, then coupled with FAM labeled TdT oligo as described in Table 31.1. The reaction plates were heat-sealed with a peelable aluminum seal and incubated at 30° C. for 1 h and 95 sC for 2 min, then held at 4 LC until the reaction was quenched.

[0394] Reactions were quenched and analyzed by CE analysis as described in Example 14.

TABLE 31.1
All lysis, reaction, quench, and analytical properties

Lysis conditions: Lysis buffer - 50 mM TEoA buffer, pH 7.5, 0.1 g/L lysozyme; Lysis buffer
volume - 400 μL; Lysate pre-treatment - Lysates were heat-treated at 66° C. and processed as
described in Example 15. The heat-treated and clarified HTP lysates were used in reactions.
Reaction conditions: Substrate - 10 mM ATP; Reaction buffer - 50 mM Tris-HCl, pH 7.5, 50 mM
LiKAcPO_{4,} 10 mM Magnesium chloride, 0.2 g/L AcK101; Lysate dilution - None; Reaction time -
3 hour
TdT coupling reaction conditions: Substrate - 10 μM SEQ ID NO: 2129, 10 μM above reaction
mixture; Reaction buffer - 20 mM TEoA, pH 7.8, 50 mM CoCl₂, 0.001 U/μL IPP; Enzyme: 4 μM
SEQ ID NO: 2125

[0395] Activity relative to SEQ ID NO: 1180 (Activity FIOP) was calculated as the fold-improvement of conversion of the variant divided by the conversion observed in the reaction with SEQ ID NO: 1180 (where the conversion may be set as the average of replicates or else the highest single sample as appropriate). Conversion was calculated as 3′PO4 product (SEQ ID NO: 2131) peak areas over the total of the unreacted substrate, byproduct, and 3′PO4 product (SEQ ID NO: 2131) peak areas. The results are shown in Table 31.2.

TABLE 31.2
Relative to SEQ ID NO: 1180

| SEQ ID | | Activity FIOP |
|---|---|---|
| NO: | Amino Acid Differences | Conversion Relative to |
| (nt/aa) | (Relative to SEQ ID NO: 1180) | SEQ ID NO: 1180 |
| 1403/1404 | I58L/A61E/W126M | +++ |
| 1405/1406 | V3D/L25A/W126M | +++ |
| 1407/1408 | E167D/R171L/D173A | +++ |
| 1409/1410 | L25A/I58L/R60L | ++ |
| 1411/1412 | V127M | ++ |
| 1413/1414 | L25M/E44C/I58C | ++ |
| 1415/1416 | V3D/L25A/V29A/R60C/K170A | + |
| 1417/1418 | V3D/L25A/V29A/W126V | + |
| 1419/1420 | V3D/E44C/W126M/K170A | + |
| 1421/1422 | K170A | + |
| 1423/1424 | E44D/I58L/R60L/A61E/W126C/ | + |
| | K170A | |

Levels of increased activity were determined relative to the reference polypeptide of SEQ ID NO: 1180 and defined as follows: “+” 1.10 to 1.17, “++” 1.17 to 1.20, “+++” 1.20 to 1.21.

### Example 32

### Improvements Over SEQ ID NO: 1180 in Conversion to Tetraphosphorylated Nucleotide

### HTP Screening for Improved 3OK Variants

[0396] SEQ ID NO: 1180 was selected as the parent 3OK enzyme. Libraries of engineered genes were produced from the parent gene using well-established techniques (e.g., saturation mutagenesis and recombination of previously identified beneficial mutations). The polypeptides encoded by each gene were produced in HTP and prepared as described in Table 32.1.

[0397] Reactions were performed at 2 μL scale in 96-well format 200 μL BioRad PCR plates. Reactions included substrate, LiKAcPO₄, MgCl₂, AcK101, 50% v/v lysate, in Tris-HCl. The reactions were set up as follows: (i) all reaction components except for lysate were pre-mixed in a single solution, and 1 μL of this solution was aliquoted into each well of the 96-well plate; (ii) 1 μL lysate was added to each well. After briefly centrifuging to collect the contents in the bottom of each well, the reaction plates were heat-sealed with a peelable aluminum seal and incubated at 30° C. for indicated hours, then held at 4° C. until the reaction was quenched by 6 μL of MeOH. The reaction mixture was further diluted to 40 μM by water, then coupled with FAM labeled TdT oligo as described in Table 32.1. The reaction plates were heat-sealed with a peelable aluminum seal and incubated at 30° C. for 1 h and 95° C. for 2 min, then held at 4° C. until the reaction was quenched.

[0398] Reactions were quenched and analyzed by CE analysis as described in Example 14.

TABLE 32.1
All lysis, reaction, quench, and analytical properties

Lysis conditions: Lysis buffer - 50 mM TEoA buffer, pH 7.5, 0.1 g/L lysozyme; Lysis buffer
volume - 400 μL; Lysate pre-treatment - Lysates were heat-treated at 55° C. and processed as
described in Example 15. The heat-treated and clarified HTP lysates were used in reactions.
Reaction conditions: Substrate - 1 mM fATP; Reaction buffer - 50 mM Tris-HCl, pH 7.5, 50 mM
LiKAcPO_{4,} 10 mM Magnesium chloride, 0.2 g/L AcK101; Lysate dilution - None; Reaction time -
3 hour
TdT coupling reaction conditions: Substrate - 10 μM SEQ ID NO: 2129, 10 μM above reaction
mixture; Reaction buffer - 20 mM TEoA, pH 7.8, 50 mM CoCl₂, 0.001 U/μL IPP; Enzyme: 4 μM
SEQ ID NO: 2125

[0399] Activity relative to SEQ ID NO: 1180 (Activity FIOP) was calculated as the fold-improvement of conversion of the variant divided by the conversion observed in the reaction with SEQ ID NO: 1180 (where the conversion may be set as the average of replicates or else the highest single sample as appropriate). Conversion was calculated as 3′P04 product (SEQ ID NO: 2135) peak areas over the total of the unreacted substrate, byproduct, and 3′PO4 product (SEQ ID NO: 2135) peak areas. The results are shown in Table 32.2.

TABLE 32.2
Relative to SEQ ID NO: 1180

| SEQ ID | | Activity FIOP |
|---|---|---|
| NO: | Amino Acid Differences | Conversion Relative |
| (nt/aa) | (Relative to SEQ ID NO: 1180) | to SEQ ID NO: 1180 |
| 1411/1412 | V127M | + |
| 1425/1426 | T17S/G63S/I104F/S125R | +++ |
| 1427/1428 | T17S/G63E | ++ |
| 1429/1430 | P28V | ++ |
| 1431/1432 | L59S/I104F/S125R | ++ |
| 1433/1434 | M22A/G55Y/A98I/V127M | ++ |
| 1435/1436 | T17S/G63S/I104N | ++ |
| 1437/1438 | L25A/A36R/W126V | ++ |
| 1439/1440 | A98I/E167D/R171M | + |
| 1441/1442 | Q79N/S125R/K129S | + |
| 1443/1444 | E44C/R60L/A61E/W126M | + |
| 1445/1446 | M22A/G55Y/A98L/E167D/R171V/ | + |
| | D173A/D197V | |
| 1447/1448 | G63S/S125Y | + |
| 1449/1450 | L25A/V29A/R60C/W126L | + |

Levels of increased activity were determined relative to the reference polypeptide of SEQ ID NO: 1180 and defined as follows: “+” 1.03 to 1.06, “++” 1.06 to 1.10, “+++” 1.10 to 1.16.

### Example 33

### Improvements Over SEQ ID NO: 1412 in Conversion to Tetraphosphorylated Nucleotide

### HTP Screening for Improved 3OK Variants

[0400] SEQ ID NO: 1412 was selected as the parent 3OK enzyme. Libraries of engineered genes were produced from the parent gene using well-established techniques (e.g., saturation mutagenesis and recombination of previously identified beneficial mutations). The polypeptides encoded by each gene were produced in HTP and prepared as described in Table 33.1.

[0401] Reactions were performed at 2 μL scale in 96-well format 200 μL BioRad PCR plates. Reactions included substrate, LiKAcPO₄, MgCl₂, AcK10m, 50% v/v lysate, in Tris-HC. The reactions were set up as follows: (i) all reaction components except for lysate were pre-mixed in a single solution, and 1 μL of this solution was aliquoted into each well of the 96-well plate; (ii) 1 μL lysate was added to each well. After briefly centrifuging to collect the contents in the bottom of each well, the reaction plates were heat-sealed with a peelable aluminum seal and incubated at 30° C. for indicated hours, then held at 4° C. until the reaction was quenched by 6 μL of MeOH. The reaction mixture was further diluted to 40 μM by water, then coupled with FAM labeled TdT oligo as described in Table 33.1. The reaction plates were heat-sealed with a peelable aluminum seal and incubated at 30° C. for 1 h and 95° C. for 2 min, then held at 4° C. until the reaction was quenched.

[0402] Reactions were quenched and analyzed by CE analysis as described in Example 14.

TABLE 33.1
All lysis, reaction, quench, and analytical properties

Lysis conditions: Lysis buffer - 50 mM TEoA buffer, pH 7.5, 0.1 g/L
lysozyme; Lysis buffer volume - 400 μL; Lysate pre-treatment - Lysates
were heat-treated at 66° C. and processed as described in Example 15.
The heat-treated and clarified HTP lysates were used in reactions.
Reaction conditions: Substrate - 10 mM ATP; Reaction buffer - 100 mM
Tris-HCl, pH 8, 50 mM LiKAcPO₄, 10 mM Magnesium chloride, 0.2 g/L
AcK101; Lysate dilution - None; Reaction time - 16 hour
TdT coupling reaction conditions: Substrate - 10 μM SEQ ID NO: 2129,
10 μM above reaction mixture; Reaction buffer - 20 mM TEoA, pH 7.8,
50 mM CoCl₂, 0.001 U/μL IPP; Enzyme: 4 μM SEQ ID NO: 2125

[0403] Activity relative to SEQ ID NO: 1412 (Activity FIOP) was calculated as the fold-improvement of conversion of the variant divided by the conversion observed in the reaction with SEQ ID NO: 1412 (where the conversion may be set as the average of replicates or else the highest single sample as appropriate). Conversion was calculated as 3′PO4 product (SEQ ID NO: 2131) peak areas over the total of the unreacted substrate, byproduct, and 3′PO4 product (SEQ ID NO: 2131) peak areas. The results are shown in Table 33.2.

TABLE 33.2
Relative to SEQ ID NO: 1412

| SEQ ID | | Activity FIOP |
|---|---|---|
| NO: | Amino Acid Differences | Conversion Relative |
| (nt/aa) | (Relative to SEQ ID NO: 1412) | to SEQ ID NO: 1412 |
| 1451/1452 | G71A/E184D | +++ |
| 1453/1454 | L27F/G71Q | +++ |
| 1455/1456 | L27F/Q68G/G71A/E184D | +++ |
| 1457/1458 | G71A | ++ |
| 1459/1460 | L27F/G71T/E184D | ++ |
| 1461/1462 | Q68G/G71R/L113M | + |
| 1463/1464 | Q68G/G71R/K157M/E184D | + |
| 1465/1466 | L27F | + |
| 1467/1468 | Q68G/G71Q/L113M/K157R/I176L | + |
| 1469/1470 | G71T/E184D | + |
| 1471/1472 | L27F/K95Y | + |
| 1473/1474 | L27F/K95H | + |
| 1475/1476 | K41A/A72D/R160S/S161V | + |
| 1477/1478 | L27F/Q68G | + |

Levels of increased activity were determined relative to the reference polypeptide of SEQ ID NO: 1412 and defined as follows: “+” 1.2 to 3.5, “++” 3.5 to 5.8, “+++” 5.8 to 8.4.

### Example 34

### Improvements Over SEQ ID NO: 1412 in Conversion to Tetraphosphorylated Nucleotide

### HTP Screening for Improved 3OK Variants

[0404] SEQ ID NO: 1412 was selected as the parent 3OK enzyme. Libraries of engineered genes were produced from the parent gene using well-established techniques (e.g., saturation mutagenesis and recombination of previously identified beneficial mutations). The polypeptides encoded by each gene were produced in HTP and prepared as described in Table 34.1.

[0405] Reactions were performed at 2 μL scale in 96-well format 200 μL BioRad PCR plates. Reactions included substrate, LiKAcPO₄, MgCl₂, AcK101, 50% v/v lysate, in Tris-HCl. The reactions were set up as follows: (i) all reaction components except for lysate were pre-mixed in a single solution, and 1 μL of this solution was aliquoted into each well of the 96-well plate; (ii) 1 μL lysate was added to each well. After briefly centrifuging to collect the contents in the bottom of each well, the reaction plates were heat-sealed with a peelable aluminum seal and incubated at 30° C. for indicated hours, then held at 4° C. until the reaction was quenched by 6 μL of MeOH. The reaction mixture was further diluted to 40 μM by water, then coupled with FAM labeled TdT oligo as described in Table 34.1. The reaction plates were heat-sealed with a peelable aluminum seal and incubated at 30° C. for 1 h and 95° C. for 2 min, then held at 4° C. until the reaction was quenched.

[0406] Reactions were quenched and analyzed by CE analysis as described in Example 14.

TABLE 34.1
All lysis, reaction, quench, and analytical properties

Lysis conditions: Lysis buffer - 50 mM TEoA buffer, pH 7.5, 0.1 g/L
lysozyme; Lysis buffer volume - 400 μL; Lysate pre-treatment - Lysates
were heat-treated at 55° C. and processed as described in Example 15.
The heat-treated and clarified HTP lysates were used in reactions.
Reaction conditions: Substrate - 10 mM UTP; Reaction buffer - 100 mM
Tris-HCl, pH 8, 50 mM LiKAcPO₄, 10 mM Magnesium chloride, 0.2 g/L
AcK101; Lysate dilution - None; Reaction time - 16 hour
TdT coupling reaction conditions: Substrate - 10 μM SEQ ID NO: 2129,
10 μM above reaction mixture; Reaction buffer - 20 mM TEoA, pH 7.8,
50 mM CoCl₂, 0.001 U/μL IPP; Enzyme: 4 μM SEQ ID NO: 2125

[0407] Activity relative to SEQ ID NO: 1412 (Activity FIOP) was calculated as the fold-improvement of conversion of the variant divided by the conversion observed in the reaction with SEQ ID NO: 1412 (where the conversion may be set as the average of replicates or else the highest single sample as appropriate). Conversion was calculated as 3′PO4 product (SEQ ID NO: 2134) peak areas over the total of the unreacted substrate, byproduct, and 3′PO4 product (SEQ ID NO: 2131) peak areas. The results are shown in Table 34.2.

TABLE 34.2
Relative to SEQ ID NO: 1412

| SEQ ID | | Activity FIOP |
|---|---|---|
| NO: | Amino Acid Differences | Conversion Relative |
| (nt/aa) | (Relative to SEQ ID NO: 1412) | to SEQ ID NO: 1412 |
| 1479/1480 | S125E | +++ |
| 1481/1482 | A61G | ++ |
| 1483/1484 | V83R | ++ |
| 1485/1486 | D49Q | + |
| 1487/1488 | A52S | + |
| 1489/1490 | S125A | + |
| 1491/1492 | D49M | + |

Levels of increased activity were determined relative to the reference polypeptide of SEQ ID NO: 1412 and defined as follows: “+” 1.1 to 1.3, “++” 1.3 to 1.4, “+++” 1.4 to 1.41.

### Example 35

### Improvements Over SEQ ID NO: 1412 in Conversion to Tetraphosphorylated Nucleotide

### HTP Screening for Improved 3OK Variants

[0408] SEQ ID NO: 1412 was selected as the parent 3OK enzyme. Libraries of engineered genes were produced from the parent gene using well-established techniques (e.g., saturation mutagenesis and recombination of previously identified beneficial mutations). The polypeptides encoded by each gene were produced in HTP and prepared as described in Table 35.1.

[0409] Reactions were performed at 2 μL scale in 96-well format 200 μL BioRad PCR plates. Reactions included substrate, LiKAcPO₄, MgCl₂, AcK101, 50% v/v lysate, in Tris-HCl. The reactions were set up as follows: (i) all reaction components except for lysate were pre-mixed in a single solution, and 1 μL of this solution was aliquoted into each well of the 96-well plate; (ii) 1 μL lysate was added to each well. After briefly centrifuging to collect the contents in the bottom of each well, the reaction plates were heat-sealed with a peelable aluminum seal and incubated at 30° C. for indicated hours, then held at 4° C. until the reaction was quenched by 6 μL of MeOH. The reaction mixture was further diluted to 40 μM by water, then coupled with FAM labeled TdT oligo as described in Table 35.1. The reaction plates were heat-sealed with a peelable aluminum seal and incubated at 30° C. for 1 h and 95° C. for 2 min, then held at 4° C. until the reaction was quenched.

[0410] Reactions were quenched and analyzed by CE analysis as described in Example 14.

TABLE 35.1
All lysis, reaction, quench, and analytical properties

Lysis conditions: Lysis buffer - 50 mM TEoA buffer, pH 7.5, 0.1 g/L
lysozyme; Lysis buffer volume - 400 μL; Lysate pre-treatment - Lysates
were heat-treated at 66° C. and processed as described in Example 15.
The heat-treated and clarified HTP lysates were used in reactions.
Reaction conditions: Substrate - 10 mM ATP; Reaction buffer - 100 mM
Tris-HCl, pH 8, 50 mM LiKAcPO₄, 10 mM Magnesium chloride, 0.2 g/L
AcK101; Lysate dilution - None; Reaction time - 16 hour
TdT coupling reaction conditions: Substrate - 10 μM SEQ ID NO: 2129,
10 μM above reaction mixture; Reaction buffer - 20 mM TEoA, pH 7.8,
50 mM CoCl₂, 0.001 U/μL IPP; Enzyme: 4 μM SEQ ID NO: 2125

[0411] Activity relative to SEQ ID NO: 1412 (Activity FIOP) was calculated as the fold-improvement of conversion of the variant divided by the conversion observed in the reaction with SEQ ID NO: 1412 (where the conversion may be set as the average of replicates or else the highest single sample as appropriate). Conversion was calculated as 3′P04 product (SEQ ID NO: 2131) peak areas over the total of the unreacted substrate, byproduct, and 3′PO4 product (SEQ ID NO: 2131) peak areas. The results are shown in Table 35.2.

TABLE 35.2
Relative to SEQ ID NO: 1412

| SEQ ID | | Activity FIOP |
|---|---|---|
| NO: | Amino Acid Differences | Conversion Relative |
| (nt/aa) | (Relative to SEQ ID NO: 1412) | to SEQ ID NO: 1412 |
| 1491/1492 | D49M | + |
| 1493/1494 | M127P | +++ |
| 1495/1496 | R186P | +++ |
| 1497/1498 | A2V | +++ |
| 1499/1500 | E101L | +++ |
| 1501/1502 | S76D | +++ |
| 1503/1504 | K82D | +++ |
| 1505/1506 | K94Q | +++ |
| 1507/1508 | R186V | +++ |
| 1509/1510 | K94N | +++ |
| 1511/1512 | T4P | +++ |
| 1513/1514 | A2W | +++ |
| 1515/1516 | A35Y | +++ |
| 1517/1518 | K94A | +++ |
| 1519/1520 | K94T | ++ |
| 1521/1522 | A2R | ++ |
| 1523/1524 | M127A | ++ |
| 1525/1526 | L97W | ++ |
| 1527/1528 | S76G | ++ |
| 1529/1530 | D49G | ++ |
| 1531/1532 | D49N | ++ |
| 1533/1534 | A13M | ++ |
| 1535/1536 | G57L | ++ |
| 1537/1538 | A35L | ++ |
| 1539/1540 | E167A | ++ |
| 1541/1542 | Q80T | ++ |
| 1543/1544 | D49V | + |
| 1545/1546 | E45L | + |
| 1547/1548 | I30W | + |
| 1549/1550 | E78V | + |
| 1551/1552 | V133N | + |
| 1553/1554 | P56L | + |
| 1555/1556 | V83E | + |
| 1557/1558 | D191G | + |
| 1559/1560 | E154Q | + |
| 1561/1562 | A35R | + |
| 1563/1564 | A52Q | + |
| 1565/1566 | S121E | + |
| 1567/1568 | R60V | + |
| 1569/1570 | A36S | + |
| 1571/1572 | K82H | + |
| 1573/1574 | I104A | + |
| 1575/1576 | A61H | + |
| 1577/1578 | E152L | + |
| 1579/1580 | K109D | + |
| 1581/1582 | V139Q | + |
| 1583/1584 | S76T | + |
| 1585/1586 | L97G | + |
| 1587/1588 | V92A | + |
| 1589/1590 | W100R | + |
| 1591/1592 | A36G | + |
| 1593/1594 | A52L | + |
| 1595/1596 | A52T | + |
| 1597/1598 | A13V | + |
| 1599/1600 | V3S | + |
| 1601/1602 | K109S | + |
| 1603/1604 | R81W | + |
| 1605/1606 | D197A | + |
| 1607/1608 | P90R | + |
| 1609/1610 | A2Q | + |
| 1611/1612 | V83L | + |
| 1613/1614 | F54M | + |
| 1615/1616 | G43E | + |
| 1617/1618 | M40R | + |
| 1619/1620 | D173A | + |
| 1621/1622 | A36E | + |
| 1623/1624 | N85R | + |
| 1625/1626 | R48V | + |
| 1627/1628 | D173I | + |
| 1629/1630 | E53G | + |
| 1631/1632 | V3G | + |
| 1633/1634 | A2L | + |
| 1635/1636 | G57K | + |
| 1637/1638 | N85M | + |
| 1639/1640 | G57V | + |
| 1641/1642 | K129P | + |
| 1643/1644 | E78G | + |
| 1645/1646 | E154T | + |
| 1647/1648 | R186A | + |
| 1649/1650 | V83Q | + |
| 1651/1652 | L97T | + |
| 1653/1654 | G63F | + |
| 1655/1656 | I104L | + |
| 1657/1658 | A52D | + |
| 1659/1660 | V139L | + |
| 1661/1662 | A32W | + |
| 1663/1664 | L198P | + |
| 1665/1666 | A36P | + |
| 1667/1668 | V3A | + |
| 1669/1670 | Q80V | + |
| 1671/1672 | R48E | + |
| 1673/1674 | W100N | + |
| 1675/1676 | L198G | + |
| 1677/1678 | G63Q | + |
| 1679/1680 | V92T | + |
| 1681/1682 | V139R | + |
| 1683/1684 | V139T | + |
| 1685/1686 | E153V | + |
| 1687/1688 | R48P | + |
| 1689/1690 | P56K | + |
| 1691/1692 | K94G | + |
| 1693/1694 | V51A | + |
| 1695/1696 | D77E | + |
| 1697/1698 | H194M | + |
| 1699/1700 | P56G | + |
| 1701/1702 | P28E | + |
| 1703/1704 | R60S | + |
| 1705/1706 | A35V | + |
| 1707/1708 | D77W | + |
| 1709/1710 | N85A | + |
| 1711/1712 | T4Q | + |
| 1713/1714 | D173P | + |
| 1715/1716 | S86Q | + |

Levels of increased activity were determined relative to the reference polypeptide of SEQ ID NO: 1412 and defined as follows: “+” 1.1 to 2.6, “++” 2.6 to 5.4, “+++” 5.4 to 21.2.

### Example 36

### Improvements Over SEQ ID NO: 1412 in Conversion to Tetraphosphorylated Nucleotide

### HTP Screening for Improved 3OK Variants

[0412] SEQ ID NO: 1412 was selected as the parent 3OK enzyme. Libraries of engineered genes were produced from the parent gene using well-established techniques (e.g., saturation mutagenesis and recombination of previously identified beneficial mutations). The polypeptides encoded by each gene were produced in HTP and prepared as described in Table 36.1.

[0413] Reactions were performed at 2 μL scale in 96-well format 200 μL BioRad PCR plates. Reactions included substrate, LiKAcPO₄, MgCl₂, AcK101, 50% v/v lysate, in Tris-HCl. The reactions were set up as follows: (i) all reaction components except for lysate were pre-mixed in a single solution, and 1 μL of this solution was aliquoted into each well of the 96-well plate; (ii) 1 μL lysate was added to each well. After briefly centrifuging to collect the contents in the bottom of each well, the reaction plates were heat-sealed with a peelable aluminum seal and incubated at 30° C. for indicated hours, then held at 4° C. until the reaction was quenched by 6 μL of MeOH. The reaction mixture was further diluted to 40 μM by water, then coupled with FAM labeled TdT oligo as described in Table 36.1. The reaction plates were heat-sealed with a peelable aluminum seal and incubated at 30° C. for 1 h and 95° C. for 2 min, then held at 4° C. until the reaction was quenched.

[0414] Reactions were quenched and analyzed by CE analysis as described in Example 14.

TABLE 36.1
All lysis, reaction, quench, and analytical properties

Lysis conditions: Lysis buffer - 50 mM TEoA buffer, pH 7.5, 0.1 g/L
lysozyme; Lysis buffer volume - 400 μL; Lysate pre-treatment - Lysates
were heat-treated at 55° C. and processed as described in Example 15.
The heat-treated and clarified HTP lysates were used in reactions.
Reaction conditions: Substrate - 10 mM CTP; Reaction buffer - 100 mM
Tris-HCl, pH 8, 50 mM LiKAcPO₄, 10 mM Magnesium chloride, 0.2 g/L
AcK101; Lysate dilution - None; Reaction time - 16 hour
TdT coupling reaction conditions: Substrate - 10 μM SEQ ID NO: 2129,
10 μM above reaction mixture; Reaction buffer - 20 mM TEoA, pH 7.8,
50 mM CoCl₂, 0.001 U/μL IPP; Enzyme: 4 μM SEQ ID NO: 2125

[0415] Activity relative to SEQ ID NO: 1412 (Activity FIOP) was calculated as the fold-improvement of conversion of the variant divided by the conversion observed in the reaction with SEQ ID NO: 1412 (where the conversion may be set as the average of replicates or else the highest single sample as appropriate). Conversion was calculated as 3′PO4 product (SEQ ID NO: 2133) peak areas over the total of the unreacted substrate, byproduct, and 3′PO4 product (SEQ ID NO: 2133) peak areas. The results are shown in Table 36.2.

TABLE 36.2
Relative to SEQ ID NO: 1412

| SEQ ID | | Activity FIOP |
|---|---|---|
| NO: | Amino Acid Differences | Conversion Relative |
| (nt/aa) | (Relative to SEQ ID NO: 1412) | to SEQ ID NO: 1412 |
| 1479/1480 | S125E | +++ |
| 1481/1482 | A61G | + |
| 1483/1484 | V83R | +++ |
| 1485/1486 | D49Q | +++ |
| 1497/1498 | A2V | + |
| 1501/1502 | S76D | +++ |
| 1513/1514 | A2W | + |
| 1529/1530 | D49G | ++ |
| 1531/1532 | D49N | + |
| 1623/1624 | N85R | + |
| 1637/1638 | N85M | ++ |
| 1709/1710 | N85A | ++ |
| 1717/1718 | A61E | +++ |
| 1719/1720 | Q195K | ++ |
| 1721/1722 | S19T | ++ |
| 1723/1724 | A35C | ++ |
| 1725/1726 | E53K | + |
| 1727/1728 | E78P | + |
| 1729/1730 | Q195A | + |
| 1731/1732 | E45Q | + |
| 1733/1734 | H194A | + |
| 1735/1736 | K170C | + |
| 1737/1738 | R48G | + |
| 1739/1740 | R48K | + |
| 1741/1742 | R171M | + |
| 1743/1744 | V83T | + |
| 1745/1746 | R171A | + |
| 1747/1748 | S121T | + |
| 1749/1750 | Q80G | + |
| 1751/1752 | K170I | + |
| 1753/1754 | D49S | + |
| 1755/1756 | K170T | + |
| 1757/1758 | S106R | + |
| 1759/1760 | N85W | + |
| 1761/1762 | A52K | + |
| 1763/1764 | A98G | + |
| 1765/1766 | D49R | + |
| 1767/1768 | K109A | + |
| 1769/1770 | R171Q | + |

Levels of increased activity were determined relative to the reference polypeptide of SEQ ID NO: 1412 and defined as follows: “+” 1.1 to 1.3, “++” 1.3 to 1.5, “+++” 1.5 to 1.9.

### Example 37

### Improvements Over SEQ ID NO: 1412 in Conversion to Tetraphosphorylated Nucleotide

### HTP Screening for Improved 3OK Variants

[0416] SEQ ID NO: 1412 was selected as the parent 3OK enzyme. Libraries of engineered genes were produced from the parent gene using well-established techniques (e.g., saturation mutagenesis and recombination of previously identified beneficial mutations). The polypeptides encoded by each gene were produced in HTP and prepared as described in Table 37.1.

[0417] Reactions were performed at 2 μL scale in 96-well format 200 μL BioRad PCR plates. Reactions included substrate, LiKAcPO₄, MgCl₂, AcK0, 50% v/v lysate, in Tris-HC. The reactions were set up as follows: (i) all reaction components except for lysate were pre-mixed in a single solution, and 1 μL of this solution was aliquoted into each well of the 96-well plate; (ii) 1 μL lysate was added to each well. After briefly centrifuging to collect the contents in the bottom of each well, the reaction plates were heat-sealed with a peelable aluminum seal and incubated at 30° C. for indicated hours, then held at 4° C. until the reaction was quenched by 6 μL of MeOH. The reaction mixture was further diluted to 40 μM by water, then coupled with FAM labeled TdT oligo as described in Table 37.1. The reaction plates were heat-sealed with a peelable aluminum seal and incubated at 30° C. for 1 h and 95° C. for 2 min, then held at 4° C. until the reaction was quenched.

[0418] Reactions were quenched and analyzed by CE analysis as described in Example 14.

TABLE 37.1
All lysis, reaction, quench, and analytical properties

Lysis conditions: Lysis buffer - 50 mM TEoA buffer, pH 7.5, 0.1 g/L
lysozyme; Lysis buffer volume - 400 μL; Lysate pre-treatment - Lysates
were heat-treated at 55° C. and processed as described in Example 15.
The heat-treated and clarified HTP lysates were used in reactions.
Reaction conditions: Substrate - 1 mM fATP; Reaction buffer - 100 mM
Tris-HCl, pH 8, 50 mM LiKAcPO₄, 10 mM Magnesium chloride,
0.2 g/L AcK101; Lysate dilution - None; Reaction time - 16 hour
TdT coupling reaction conditions: Substrate - 10 μM SEQ ID NO: 2130,
10 μM above reaction mixture; Reaction buffer - 20 mM TEoA, pH 7.8,
50 mM CoCl₂, 0.001 U/μL IPP; Enzyme: 4 μM SEQ ID NO: 2127

[0419] Activity relative to SEQ ID NO: 1412 (Activity FIOP) was calculated as the fold-improvement of conversion of the variant divided by the conversion observed in the reaction with SEQ ID NO: 1412 (where the conversion may be set as the average of replicates or else the highest single sample as appropriate). Conversion was calculated as 3′PO4 product (SEQ ID NO: 2149) peak areas over the total of the unreacted substrate, byproduct, and 3′PO4 product (SEQ ID NO: 2149) peak areas. The results are shown in Table 37.2.

TABLE 37.2
Relative to SEQ ID NO: 1412

| SEQ ID | | Activity FIOP |
|---|---|---|
| NO: | Amino Acid Differences | Conversion Relative |
| (nt/aa) | (Relative to SEQ ID NO: 1412) | to SEQ ID NO: 1412 |
| 1507/1508 | R186V | +++ |
| 1517/1518 | K94A | + |
| 1541/1542 | Q80T | +++ |
| 1567/1568 | R60V | + |
| 1571/1572 | K82H | + |
| 1579/1580 | K109D | + |
| 1587/1588 | V92A | + |
| 1601/1602 | K109S | ++ |
| 1611/1612 | V83L | + |
| 1617/1618 | M40R | ++ |
| 1625/1626 | R48V | + |
| 1635/1636 | G57K | + |
| 1671/1672 | R48E | + |
| 1673/1674 | W100N | + |
| 1679/1680 | V92T | + |
| 1691/1692 | K94G | ++ |
| 1701/1702 | P28E | ++ |
| 1703/1704 | R60S | +++ |
| 1729/1730 | Q195A | ++ |
| 1733/1734 | H194A | + |
| 1737/1738 | R48G | + |
| 1739/1740 | R48K | + |
| 1763/1764 | A98G | + |
| 1771/1772 | D49L | +++ |
| 1773/1774 | M127T | +++ |
| 1775/1776 | L193V | ++ |
| 1777/1778 | R48A | ++ |
| 1779/1780 | K94R | ++ |
| 1781/1782 | G57A | ++ |
| 1783/1784 | L198S | ++ |
| 1785/1786 | R171L | + |
| 1787/1788 | R48C | + |
| 1789/1790 | R48T | + |
| 1791/1792 | I104V | + |
| 1793/1794 | K109M | + |
| 1795/1796 | R186S | + |
| 1797/1798 | V51I | + |

Levels of increased activity were determined relative to the reference polypeptide of SEQ ID NO: 1412 and defined as follows: “+” 1.1 to 1.2, “++” 1.2 to 1.3, “+++” 1.3 to 1.6.

### Example 38

### Improvements Over SEQ ID NO: 1464 in Conversion to Tetraphosphorylated Nucleotide

### HTP Screening for Improved 3OK Variants

[0420] SEQ ID NO: 1464 was selected as the parent 3OK enzyme. Libraries of engineered genes were produced from the parent gene using well-established techniques (e.g., saturation mutagenesis and recombination of previously identified beneficial mutations). The polypeptides encoded by each gene were produced in HTP and prepared as described in Table 38.1.

[0421] Reactions were performed at 2 μL scale in 96-well format 200 μL BioRad PCR plates. Reactions included substrate, LiKAcPO₄, MgCl₂, AcK10m, 50% v/v lysate, in Tris-HC. The reactions were set up as follows: (i) all reaction components except for lysate were pre-mixed in a single solution, and 1 μL of this solution was aliquoted into each well of the 96-well plate; (ii) 1 μL lysate was added to each well. After briefly centrifuging to collect the contents in the bottom of each well, the reaction plates were heat-sealed with a peelable aluminum seal and incubated at 30° C. for indicated hours, then held at 4° C. until the reaction was quenched by 6 μL of MeOH. The reaction mixture was further diluted to 40 μM by water, then coupled with FAM labeled TdT oligo as described in Table 38.1. The reaction plates were heat-sealed with a peelable aluminum seal and incubated at 30° C. for 1 h and 95° C. for 2 min, then held at 4° C. until the reaction was quenched.

[0422] Reactions were quenched and analyzed by CE analysis as described in Example 14.

TABLE 38.1
All lysis, reaction, quench, and analytical properties

Lysis conditions: Lysis buffer - 50 mM TEoA buffer, pH 7.5, 0.1 g/L
lysozyme; Lysis buffer volume - 400 μL; Lysate pre-treatment - Lysates
were heat-treated at 65° C. and processed as described in Example 15.
The heat-treated and clarified HTP lysates were used in reactions.
Reaction conditions: Substrate - 10 mM ATP; Reaction buffer - 100 mM
Tris-HCl, pH 8, 50 mM LiKAcPO₄, 10 mM Magnesium chloride,
0.2 g/L AcK101; Lysate dilution - None; Reaction time - 16 hour
TdT coupling reaction conditions: Substrate - 10 μM SEQ ID NO: 2130,
10 μM above reaction mixture; Reaction buffer - 20 mM TEoA, pH 7.8,
50 mM CoCl₂, 0.001 U/μL IPP; Enzyme: 4 μM SEQ ID NO: 2127

[0423] Activity relative to SEQ ID NO: 1464 (Activity FIOP) was calculated as the fold-improvement of conversion of the variant divided by the conversion observed in the reaction with SEQ ID NO: 1464 (where the conversion may be set as the average of replicates or else the highest single sample as appropriate). Conversion was calculated as 3′PO4 product (SEQ ID NO: 2145) peak areas over the total of the unreacted substrate, byproduct, and 3′PO4 product (SEQ ID NO: 2145) peak areas. The results are shown in Table 38.2.

TABLE 38.2
Relative to SEQ ID NO: 1464

| SEQ ID | | Activity FIOP |
|---|---|---|
| NO: | Amino Acid Differences | Conversion Relative |
| (nt/aa) | (Relative to SEQ ID NO: 1464) | to SEQ ID NO: 1464 |
| 1799/1800 | E64R/F150L/N181T | +++ |
| 1801/1802 | E64R/A72D/I115V/F150L | +++ |
| 1803/1804 | G10S/L27F/A38S/D49M | ++ |
| 1805/1806 | L117G/F150L | ++ |
| 1807/1808 | L27F/R60A/V83R/S125E | ++ |
| 1809/1810 | E64R/H103M/F150L/N181T | ++ |
| 1811/1812 | H103F/I182E | ++ |
| 1813/1814 | A72D/H103M/S125A/F150L/R160E/ | ++ |
| | N181S | |
| 1815/1816 | G68S/A72L/V83R/V175E | ++ |
| 1817/1818 | K41A/E64R/A72D/H103M/R160K | ++ |
| 1819/1820 | F150L/R160E/N181V | + |
| 1821/1822 | V3T/A20C/R74F/H103F | + |
| 1823/1824 | L27F/V83R/L113A | + |
| 1825/1826 | I192L | + |
| 1827/1828 | H103L/I182P | + |
| 1829/1830 | F150L/N181S | + |
| 1831/1832 | T151G | + |
| 1833/1834 | R60A/V175E | + |
| 1835/1836 | E64R/S161V | + |
| 1837/1838 | K41A/E64R/H103M/L117G/F150L/ | + |
| | R160K/S161V | |
| 1839/1840 | R74F/S165I | + |
| 1841/1842 | A72D/H103M/Q124A/R160K/S161V | + |
| 1843/1844 | R60L/A61P | + |
| 1845/1846 | D49M/G68S/Y134M | + |
| 1847/1848 | V39C | + |
| 1849/1850 | L27F/D49Q/R74H | + |
| 1851/1852 | I182E | + |
| 1853/1854 | G10S/V83R | + |
| 1855/1856 | R23A/L27F/D49Q/V83R/S125E/ | + |
| | L141I | |
| 1857/1858 | A72D/Q124Y/F150L/R160S/N181V | + |
| 1859/1860 | R160K/N181T | + |
| 1861/1862 | E64R | + |
| 1863/1864 | A61P/T110A/A146H/T151G | + |
| 1865/1866 | G10S/R23A/L27F/A38S/D49Q/ | + |
| | L113A | |
| 1867/1868 | D49M/R60A | + |
| 1869/1870 | D49Q/E64A/M96T/L113A/V175E | + |

Levels of increased activity were determined relative to the reference polypeptide of SEQ ID NO: 1464 and defined as follows: “+” 1.19 to 2.7, “++” 2.7 to 5.3, “+++” 5.3 to 13.2.

### Example 39

### Improvements Over SEQ ID NO: 1464 in Conversion to Tetraphosphorylated Nucleotide

### HTP Screening for Improved 3OK Variants

[0424] SEQ ID NO: 1464 was selected as the parent 3OK enzyme. Libraries of engineered genes were produced from the parent gene using well-established techniques (e.g., saturation mutagenesis and recombination of previously identified beneficial mutations). The polypeptides encoded by each gene were produced in HTP and prepared as described in Table 39.1.

[0425] Reactions were performed at 2 μL scale in 96-well format 200 μL BioRad PCR plates. Reactions included substrate, LiKAcPO₄, MgCl₂, AcK101, 50% v/v lysate, in Tris-HCl. The reactions were set up as follows: (i) all reaction components except for lysate were pre-mixed in a single solution, and 1 μL of this solution was aliquoted into each well of the 96-well plate; (ii) 1 μL lysate was added to each well. After briefly centrifuging to collect the contents in the bottom of each well, the reaction plates were heat-sealed with a peelable aluminum seal and incubated at 30° C. for indicated hours, then held at 4° C. until the reaction was quenched by 6 μL of MeOH. The reaction mixture was further diluted to 40 μM by water, then coupled with FAM labeled TdT oligo as described in Table 39.1. The reaction plates were heat-sealed with a peelable aluminum seal and incubated at 30° C. for 1 h and 95° C. for 2 min, then held at 4° C. until the reaction was quenched.

[0426] Reactions were quenched and analyzed by CE analysis as described in Example 14.

TABLE 39.1
All lysis, reaction, quench, and analytical properties

Lysis conditions: Lysis buffer - 50 mM TEoA buffer, pH 7.5, 0.1 g/L
lysozyme; Lysis buffer volume - 400 μL; Lysate pre-treatment - Lysates
were heat-treated at 55° C. and processed as described in Example 15.
The heat-treated and clarified HTP lysates were used in reactions.
Reaction conditions: Substrate - 1 mM fATP; Reaction buffer - 100 mM
Tris-HCl, pH 8, 50 mM LiKAcPO₄, 10 mM Magnesium chloride,
0.2 g/L AcK101; Lysate dilution - None; Reaction time - 16 hour
TdT coupling reaction conditions: Substrate - 10 μM SEQ ID NO: 2130,
10 μM above reaction mixture; Reaction buffer - 20 mM TEoA, pH 7.8,
50 mM CoCl₂, 0.001 U/μL IPP; Enzyme: 4 μM SEQ ID NO: 2127

[0427] Activity relative to SEQ ID NO: 1464 (Activity FIOP) was calculated as the fold-improvement of conversion of the variant divided by the conversion observed in the reaction with SEQ ID NO: 1464 (where the conversion may be set as the average of replicates or else the highest single sample as appropriate). Conversion was calculated as 3′PO4 product (SEQ ID NO: 2149) peak areas over the total of the unreacted substrate, byproduct, and 3′PO4 product (SEQ ID NO: 2149) peak areas. The results are shown in Table 39.2.

TABLE 39.2
Relative to SEQ ID NO: 1464

| SEQ ID | | Activity FIOP |
|---|---|---|
| NO: | Amino Acid Differences | Conversion Relative |
| (nt/aa) | (Relative to SEQ ID NO: 1464) | to SEQ ID NO: 1464 |
| 1801/1802 | E64R/A72D/I115V/F150L | +++ |
| 1813/1814 | A72D/H103M/S125A/F150L/R160E/ | + |
| | N181S | |
| 1825/1826 | I192L | + |
| 1871/1872 | A61P/T110A/S165Q | +++ |
| 1873/1874 | A20C/H103L/I192L | ++ |
| 1875/1876 | A52S/A61P | + |
| 1877/1878 | A72D | + |

Levels of increased activity were determined relative to the reference polypeptide of SEQ ID NO: 1464 and defined as follows: “+” 1.1 to 1.2, “++” 1.2 to 1.3, “+++” 1.3 to 1.33.

### Example 40

### Improvements Over SEQ ID NO: 1464 in Conversion to Tetraphosphorylated Nucleotide

### HTP Screening for Improved 3OK Variants

[0428] SEQ ID NO: 1464 was selected as the parent 3OK enzyme. Libraries of engineered genes were produced from the parent gene using well-established techniques (e.g., saturation mutagenesis and recombination of previously identified beneficial mutations). The polypeptides encoded by each gene were produced in HTP and prepared as described in Table 40.1.

[0429] Reactions were performed at 2 μL scale in 96-well format 200 μL BioRad PCR plates. Reactions included substrate, LiKAcPO₄, MgCl₂, AcK10m, 50% v/v lysate, in Tris-HC. The reactions were set up as follows: (i) all reaction components except for lysate were pre-mixed in a single solution, and 1 μL of this solution was aliquoted into each well of the 96-well plate; (ii) 1 μL lysate was added to each well. After briefly centrifuging to collect the contents in the bottom of each well, the reaction plates were heat-sealed with a peelable aluminum seal and incubated at 30° C. for indicated hours, then held at 4° C. until the reaction was quenched by 6 μL of MeOH. The reaction mixture was further diluted to 40 μM by water, then coupled with FAM labeled TdT oligo as described in Table 40.1. The reaction plates were heat-sealed with a peelable aluminum seal and incubated at 30° C. for 1 h and 95° C. for 2 min, then held at 4° C. until the reaction was quenched.

[0430] Reactions were quenched and analyzed by CE analysis as described in Example 14.

TABLE 40.1
All lysis, reaction, quench, and analytical properties

Lysis conditions:
Lysis buffer - 50 mM TEoA buffer, pH 7.5, 0.1 g/L lysozyme;
Lysis buffer volume - 400 μL;
Lysate pre-treatment - Lysates were heat-treated at 55° C. and processed
as described in Example 15. The heat-treated and clarified HTP lysates
were used in reactions.
Reaction conditions:
Substrate - 10 mM CTP;
Reaction buffer - 100 mM Tris-HCl, pH 8, 50 mM LiKAcPO_{4,} 10 mM
Magnesium chloride, 0.2 g/L AcK101;
Lysate dilution - None;
Reaction time - 16 hour
TdT coupling reaction conditions:
Substrate - 10 μM SEQ ID NO: 2130, 10 μM above reaction mixture;
Reaction buffer - 20 mM TEoA, pH 7.8, 50 mM CoCl₂, 0.001 U/μL IPP;
Enzyme: 4 μM SEQ ID NO: 2127

[0431] Activity relative to SEQ ID NO: 1464 (Activity FIOP) was calculated as the fold-improvement of conversion of the variant divided by the conversion observed in the reaction with SEQ ID NO: 1464 (where the conversion may be set as the average of replicates or else the highest single sample as appropriate). Conversion was calculated as 3′PO4 product (SEQ ID NO: 2147) peak areas over the total of the unreacted substrate, byproduct, and 3′PO4 product (SEQ ID NO: 2147) peak areas. The results are shown in Table 40.2.

TABLE 40.2
Relative to SEQ ID NO: 1464

| SEQ ID | | Activity FIOP |
|---|---|---|
| NO: | Amino Acid Differences | Conversion Relative |
| (nt/aa) | (Relative to SEQ ID NO: 1464) | to SEQ ID NO: 1464 |
| 1879/1880 | G68E | +++ |
| 1881/1882 | N148G | +++ |
| 1883/1884 | F150L | +++ |
| 1885/1886 | I182R/G205D | ++ |
| 1887/1888 | F75L | ++ |
| 1889/1890 | S16T | ++ |
| 1891/1892 | T151P | ++ |
| 1893/1894 | S165Q | ++ |
| 1895/1896 | A20R | ++ |
| 1897/1898 | L93V | ++ |
| 1899/1900 | G122E | + |
| 1901/1902 | I182R | + |
| 1903/1904 | V139T | + |
| 1905/1906 | A20H | + |
| 1907/1908 | N85T | + |
| 1909/1910 | V88L | + |
| 1911/1912 | G89L | + |
| 1913/1914 | Y134W | + |
| 1915/1916 | A35L | + |
| 1917/1918 | A146S | + |
| 1919/1920 | N85L | + |
| 1921/1922 | S161L | + |
| 1923/1924 | M127V | + |
| 1879/1880 | G68E | +++ |
| 1881/1882 | N148G | +++ |
| 1883/1884 | F150L | +++ |
| 1885/1886 | I182R/G205D | ++ |
| 1887/1888 | F75L | ++ |
| 1889/1890 | S16T | ++ |
| 1891/1892 | T151P | ++ |
| 1893/1894 | S165Q | ++ |
| 1895/1896 | A20R | ++ |
| 1897/1898 | L93V | ++ |
| 1899/1900 | G122E | + |
| 1901/1902 | I182R | + |
| 1903/1904 | V139T | + |
| 1905/1906 | A20H | + |
| 1907/1908 | N85T | + |
| 1909/1910 | V88L | + |
| 1911/1912 | G89L | + |
| 1913/1914 | Y134W | + |
| 1915/1916 | A35L | + |
| 1917/1918 | A146S | + |
| 1919/1920 | N85L | + |
| 1921/1922 | S161L | + |
| 1923/1924 | M127V | + |

Levels of increased activity were determined relative to the reference polypeptide of SEQ ID NO: 1464 and defined as follows: “+” 1.1 to 1.3, “++” 1.3to 1.4, “+++” 1.4 to 1.7.

### Example 41

### Improvements Over SEQ ID NO: 1464 in Conversion to Tetraphosphorylated Nucleotide

### HTP Screening for Improved 3OK Variants

[0432] SEQ ID NO: 1464 was selected as the parent 3OK enzyme. Libraries of engineered genes were produced from the parent gene using well-established techniques (e.g., saturation mutagenesis and recombination of previously identified beneficial mutations). The polypeptides encoded by each gene were produced in HTP and prepared as described in Table 41.1.

[0433] Reactions were performed at 2 μL scale in 96-well format 200 μL BioRad PCR plates. Reactions included substrate, LiKAcPO₄, MgCl₂, AcK101, 50% v/v lysate, in Tris-HCl. The reactions were set up as follows: (i) all reaction components except for lysate were pre-mixed in a single solution, and 1 μL of this solution was aliquoted into each well of the 96-well plate; (ii) 1 μL lysate was added to each well. After briefly centrifuging to collect the contents in the bottom of each well, the reaction plates were heat-sealed with a peelable aluminum seal and incubated at 30° C. for indicated hours, then held at 4° C. until the reaction was quenched by 6 μL of MeOH. The reaction mixture was further diluted to 40 μM by water, then coupled with FAM labeled TdT oligo as described in Table 41.1. The reaction plates were heat-sealed with a peelable aluminum seal and incubated at 30° C. for 1 h and 95° C. for 2 min, then held at 4° C. until the reaction was quenched.

[0434] Reactions were quenched and analyzed by CE analysis as described in Example 14.

TABLE 41.1
All lysis, reaction, quench, and analytical properties

Lysis conditions:
Lysis buffer - 50 mM TEoA buffer, pH 7.5, 0.1 g/L lysozyme;
Lysis buffer volume - 400 μL;
Lysate pre-treatment - Lysates were heat-treated at 65° C. and processed
as described in Example 15. The heat-treated and clarified HTP lysates
were used in reactions.
Reaction conditions:
Substrate - 10 mM ATP;
Reaction buffer - 100 mM Tris-HCl, pH 8, 50 mM LiKAcPO_{4,} 10 mM
Magnesium chloride, 0.2 g/L AcK101;
Lysate dilution - None;
Reaction time - 16 hour
TdT coupling reaction conditions:
Substrate - 10 μM SEQ ID NO: 2130, 10 μM above reaction mixture;
Reaction buffer - 20 mM TEoA, pH 7.8, 50 mM CoCl₂, 0.001 U/μL IPP;
Enzyme: 4 μM SEQ ID NO: 2127

[0435] Activity relative to SEQ ID NO: 1464 (Activity FIOP) was calculated as the fold-improvement of conversion of the variant divided by the conversion observed in the reaction with SEQ ID NO: 1464 (where the conversion may be set as the average of replicates or else the highest single sample as appropriate). Conversion was calculated as 3′PO4 product (SEQ ID NO: 2145) peak areas over the total of the unreacted substrate, byproduct, and 3′PO4 product (SEQ ID NO: 2145) peak areas. The results are shown in Table 41.2.

TABLE 41.2
Relative to SEQ ID NO: 1464

| SEQ ID | | Activity FIOP |
|---|---|---|
| NO: | Amino Acid Differences | Conversion Relative |
| (nt/aa) | (Relative to SEQ ID NO: 1464) | to SEQ ID NO: 1464 |
| 1879/1880 | G68E | +++ |
| 1881/1882 | N148G | + |
| 1883/1884 | F150L | +++ |
| 1885/1886 | I182R/G205D | + |
| 1887/1888 | F75L | ++ |
| 1901/1902 | I182R | + |
| 1903/1904 | V139T | +++ |
| 1905/1906 | A20H | +++ |
| 1909/1910 | V88L | ++ |
| 1911/1912 | G89L | + |
| 1915/1916 | A35L | + |
| 1919/1920 | N85L | + |
| 1921/1922 | S161L | + |
| 1925/1926 | S121G | +++ |
| 1927/1928 | A20G | +++ |
| 1929/1930 | M22L | +++ |
| 1931/1932 | R160H | +++ |
| 1933/1934 | I176L | +++ |
| 1935/1936 | A146D | ++ |
| 1937/1938 | R142G | ++ |
| 1939/1940 | D136S | ++ |
| 1941/1942 | R81N | ++ |
| 1943/1944 | L141V | ++ |
| 1945/1946 | G68S | + |
| 1947/1948 | S121T | + |
| 1949/1950 | A35V | + |
| 1951/1952 | D137S | + |
| 1953/1954 | R71A | + |
| 1955/1956 | F150H | + |
| 1957/1958 | T151A | + |
| 1959/1960 | V18L | + |
| 1961/1962 | L7V | + |
| 1963/1964 | A146N | + |
| 1965/1966 | F75N | + |
| 1967/1968 | F150C | + |
| 1969/1970 | R67K | + |
| 1971/1972 | E153A | + |
| 1973/1974 | I182P | + |
| 1975/1976 | T185A | + |
| 1977/1978 | G68Y | + |
| 1979/1980 | R160T | + |
| 1981/1982 | R160S | + |
| 1983/1984 | R160V | + |

Levels of increased activity were determined relative to the reference polypeptide of SEQ ID NO: 1464 and defined as follows: “+” 1.2 to 4.1, “++” 4.1 to 7.1, “+++” 7.1 to 11.9.

### Example 42

### Improvements Over SEQ ID NO: 1464 in Conversion to Tetraphosphorylated Nucleotide

### HTP Screening for Improved 3OK Variants

[0436] SEQ ID NO: 1464 was selected as the parent 3OK enzyme. Libraries of engineered genes were produced from the parent gene using well-established techniques (e.g., saturation mutagenesis and recombination of previously identified beneficial mutations). The polypeptides encoded by each gene were produced in HTP and prepared as described in Table 42.1.

[0437] Reactions were performed at 2 μL scale in 96-well format 200 μL BioRad PCR plates. Reactions included substrate, LiKAcPO₄, MgCl₂, AcK101, 50% v/v lysate, in Tris-HCl. The reactions were set up as follows: (i) all reaction components except for lysate were pre-mixed in a single solution, and 1 μL of this solution was aliquoted into each well of the 96-well plate; (ii) 1 μL lysate was added to each well. After briefly centrifuging to collect the contents in the bottom of each well, the reaction plates were heat-sealed with a peelable aluminum seal and incubated at 30° C. for indicated hours, then held at 4° C. until the reaction was quenched by 6 μL of MeOH. The reaction mixture was further diluted to 40 μM by water, then coupled with FAM labeled TdT oligo as described in Table 42.1. The reaction plates were heat-sealed with a peelable aluminum seal and incubated at 30° C. for 1 h and 95° C. for 2 min then held at 4° C. until the reaction was quenched.

[0438] Reactions were quenched and analyzed by CE analysis as described in Example 14.

TABLE 42.1
All lysis, reaction, quench, and analytical properties

Lysis conditions:
Lysis buffer - 50 mM TEoA buffer, pH 7.5, 0.1 g/L lysozyme;
Lysis buffer volume - 400 μL;
Lysate pre-treatment - Lysates were heat-treated at 55° C. and processed
as described in Example 15. The heat-treated and clarified HTP lysates
were used in reactions.
Reaction conditions:
Substrate - 1 mM fATP;
Reaction buffer - 100 mM Tris-HCl, pH 8, 50 mM LiKAcPO_{4,} 10 mM
Magnesium chloride, 0.2 g/L AcK101;
Lysate dilution - None;
Reaction time - 16 hour
TdT coupling reaction conditions:
Substrate - 10 μM SEQ ID NO: 2130, 10 μM above reaction mixture;
Reaction buffer - 20 mM TEoA, pH 7.8, 50 mM CoCl₂, 0.001 U/μL IPP;
Enzyme: 4 μM SEQ ID NO: 2127

[0439] Activity relative to SEQ ID NO: 1464 (Activity FIOP) was calculated as the fold-improvement of conversion of the variant divided by the conversion observed in the reaction with SEQ ID NO: 1464 (where the conversion may be set as the average of replicates or else the highest single sample as appropriate). Conversion was calculated as 3′PO4 product (SEQ ID NO: 2149) peak areas over the total of the unreacted substrate, byproduct, and 3′P04 product (SEQ ID NO: 2149) peak areas. The results are shown in Table 42.2.

TABLE 42.2
Relative to SEQ ID NO: 1464

| SEQ ID | | Activity FIOP |
|---|---|---|
| NO: | Amino Acid Differences | Conversion Relative |
| (nt/aa) | (Relative to SEQ ID NO: 1464) | to SEQ ID NO: 1464 |
| 1893/1894 | S165Q | ++ |
| 1897/1898 | L93V | + |
| 1915/1916 | A35L | ++ |
| 1921/1922 | S161L | +++ |
| 1923/1924 | M127V | + |
| 1949/1950 | A35V | + |
| 1953/1954 | R71A | + |
| 1975/1976 | T185A | + |
| 1985/1986 | A35M | +++ |
| 1987/1988 | M127A | +++ |
| 1989/1990 | L113W | +++ |
| 1991/1992 | I30V | +++ |
| 1993/1994 | K95V | +++ |
| 1995/1996 | M40R | ++ |
| 1997/1998 | G89M | ++ |
| 1999/2000 | A35R | ++ |
| 2001/2002 | A35D | ++ |
| 2003/2004 | A20S | ++ |
| 2005/2006 | A20I | + |
| 2007/2008 | A20K | + |
| 2009/2010 | A36S | + |
| 2011/2012 | N85E | + |
| 2013/2014 | I30G | + |
| 2015/2016 | R23A | + |
| 2017/2018 | A20Q | + |
| 2019/2020 | G89T | + |
| 2021/2022 | V18A | + |
| 2023/2024 | V29I | + |
| 2025/2026 | R142S | + |
| 2027/2028 | R37V | + |
| 2029/2030 | M40L | + |
| 2031/2032 | A146Q | + |
| 2033/2034 | R142A | + |
| 2035/2036 | A38I | + |

Levels of increased activity were determined relative to the reference polypeptide of SEQ ID NO: 1464 and defined as follows: “+” 1.1 to 1.3, “++” 1.3 to 1.5, “+++” 1.5 to 1.8.

### Example 43

### Improvements Over SEQ ID NO: 1464 in Conversion to Tetraphosphorylated Nucleotide

### HTP Screening for Improved 3OK Variants

[0440] SEQ ID NO: 1464 was selected as the parent 3OK enzyme. Libraries of engineered genes were produced from the parent gene using well-established techniques (e.g., saturation mutagenesis and recombination of previously identified beneficial mutations). The polypeptides encoded by each gene were produced in HTP and prepared as described in Table 43.1.

[0441] Reactions were performed at 2 μL scale in 96-well format 200 μL BioRad PCR plates. Reactions included substrate, LiKAcPO₄, MgCl₂, AcK101, 50% v/v lysate, in Tris-HC. The reactions were set up as follows: (i) all reaction components except for lysate were pre-mixed in a single solution, and 1 μL of this solution was aliquoted into each well of the 96-well plate; (ii) 1 μL lysate was added to each well. After briefly centrifuging to collect the contents in the bottom of each well, the reaction plates were heat-sealed with a peelable aluminum seal and incubated at 30° C. for indicated hours, then held at 4° C. until the reaction was quenched by 6 μL of MeOH. The reaction mixture was further diluted to 40 μM by water, then coupled with FAM labeled TdT oligo as described in Table 43.1. The reaction plates were heat-sealed with a peelable aluminum seal and incubated at 30° C. for 1 h and 95° C. for 2 min, then held at 4° C. until the reaction was quenched.

[0442] Reactions were quenched and analyzed by CE analysis as described in Example 14.

TABLE 43.1
All lysis, reaction, quench, and analytical properties

Lysis conditions:
Lysis buffer - 50 mM TEoA buffer, pH 7.5, 0.1 g/L lysozyme;
Lysis buffer volume - 400 μL;
Lysate pre-treatment - Lysates were heat-treated at 55° C. and processed
as described in Example 15. The heat-treated and clarified HTP lysates
were used in reactions.
Reaction conditions:
Substrate - 1 mM GTP-αS;
Reaction buffer - 100 mM Tris-HCl, pH 8, 50 mM LiKAcPO_{4,} 10 mM
Magnesium chloride, 0.2 g/L AcK101;
Lysate dilution - None;
Reaction time - 16 hour
TdT coupling reaction conditions:
Substrate - 10 μM SEQ ID NO: 2130, 10 μM above reaction mixture;
Reaction buffer - 20 mM TEoA, pH 7.8, 50 mM CoCl₂, 0.001 U/μL IPP;
Enzyme: 4 μM SEQ ID NO: 2127

[0443] Activity relative to SEQ ID NO: 2054 (Activity FIOP) (SEQ ID 1464 has no activity, SEQ ID 2054 was used instead for FIOP calculation.) was calculated as the fold-improvement of conversion of the variant divided by the conversion observed in the reaction with SEQ ID 2054 (where the conversion may be set as the average of replicates or else the highest single sample as appropriate). Conversion was calculated as 3′PO4 product (SEQ ID NO: 2158) peak areas over the total of the unreacted substrate, byproduct, and 3′PO4 product (SEQ ID NO: 2158) peak areas. The results are shown in Table 43.2.

TABLE 43.2
Relative to SEQ ID NO: 2054

| SEQ ID | | Activity FIOP |
|---|---|---|
| NO: | Amino Acid Differences | Conversion Relative |
| (nt/aa) | (Relative to SEQ ID NO: 1464) | to SEQ ID NO: 2054 |
| 2037/2038 | V133R | +++ |
| 2039/2040 | T8R | ++ |
| 2041/2042 | V88W | ++ |
| 2043/2044 | A155P | ++ |
| 2045/2046 | L113R | ++ |
| 2047/2048 | S161V | + |
| 2049/2050 | I11P | + |
| 2051/2052 | R143V | + |
| 2053/2054 | K15Y | + |

Levels of increased activity were determined relative to the reference polypeptide of SEQ ID NO: 2054 and defined as follows: “+” 1.0 to 2.0, “++” 2.0 to 2.7, “+++” 2.7 to 2.9.

### Example 44

### Improvements Over SEQ ID NO: 1800 in Conversion to Tetraphosphorylated Nucleotide

### HTP Screening for Improved 3OK Variants

[0444] SEQ ID NO: 1800 was selected as the parent 3OK enzyme. Libraries of engineered genes were produced from the parent gene using well-established techniques (e.g., saturation mutagenesis and recombination of previously identified beneficial mutations). The polypeptides encoded by each gene were produced in HTP and prepared as described in Table 44.1.

[0445] Reactions were performed at 2 μL scale in 96-well format 200 μL BioRad PCR plates. Reactions included substrate, LiKAcPO₄, MgCl₂, AcK101, 50% v/v lysate, in Tris-HCl. The reactions were set up as follows: (i) all reaction components except for lysate were pre-mixed in a single solution, and 1 μL of this solution was aliquoted into each well of the 96-well plate; (ii) 1 μL lysate was added to each well. After briefly centrifuging to collect the contents in the bottom of each well, the reaction plates were heat-sealed with a peelable aluminum seal and incubated at 30° C. for indicated hours, then held at 4° C. until the reaction was quenched by 6 μL of MeOH. The reaction mixture was further diluted to 40 μM by water, then coupled with FAM labeled TdT oligo as described in Table 44.1. The reaction plates were heat-sealed with a peelable aluminum seal and incubated at 30° C. for 1 h and 95° C. for 2 min, then held at 4° C. until the reaction was quenched.

[0446] Reactions were quenched and analyzed by CE analysis as described in Example 14.

TABLE 44.1
All lysis, reaction, quench, and analytical properties

Lysis conditions:
Lysis buffer - 50 mM TEoA buffer, pH 7.5, 0.1 g/L lysozyme;
Lysis buffer volume - 400 μL;
Lysate pre-treatment - Lysates were heat-treated at 66° C. and processed
as described in Example 15. The heat-treated and clarified HTP lysates
were used in reactions.
Reaction conditions:
Substrate - 10 mM ATP;
Reaction buffer - 100 mM Tris-HCl, pH 8, 50 mM LiKAcPO_{4,} 10 mM
Magnesium chloride, 0.2 g/L AcK101;
Lysate dilution - None;
Reaction time - 16 hour
TdT coupling reaction conditions: Substrate - 10 μM SEQ ID NO: 2130,
10 μM above reaction mixture;
Reaction buffer - 20 mM TEoA, pH 7.8, 50 mM CoCl₂, 0.001 U/μL IPP;
Enzyme: 4 μM SEQ ID NO: 2127

[0447] Activity relative to SEQ ID 1800 (Activity FIOP) was calculated as the fold-improvement of conversion of the variant divided by the conversion observed in the reaction with SEQ ID 1800 (where the conversion may be set as the average of replicates or else the highest single sample as appropriate). Conversion was calculated as 3′PO4 product (SEQ ID NO: 2145) peak areas over the total of the unreacted substrate, byproduct, and 3′PO4 product (SEQ ID NO: 2145) peak areas. The results are shown in Table 44.2.

TABLE 44.2
Relative to SEQ ID NO: 1800

| | | Activity |
|---|---|---|
| | | FIOP |
| | | Conversion |
| SEQ ID | | Relative to |
| NO: | Amino Acid Differences | SEQ ID NO: |
| (nt/aa) | (Relative to SEQ ID NO: 1800) | 1800 |
| 2055/2056 | R186V | +++ |
| 2057/2058 | S165Q | +++ |
| 2059/2060 | R60V/L193V | +++ |
| 2061/2062 | P56L/S76D/Q80T/K170T | ++ |
| 2063/2064 | E53K/P56L/R60V/S76G | ++ |
| 2065/2066 | S76G/Q80T | ++ |
| 2067/2068 | P56L/R60V/N85M/L193V | ++ |
| 2069/2070 | R48E/E53K/R60V/S76D/Q80T/L193V | ++ |
| 2071/2072 | P56L/R60V | ++ |
| 2073/2074 | M40R/V92A/I104V | ++ |
| 2075/2076 | P56L/R60V/S76D/E78V/Q80T | + |
| 2077/2078 | R60A/A61E | + |
| 2079/2080 | E101L/K109S/L198S | + |
| 2081/2082 | L27F | + |
| 2083/2084 | L27F/D49G/V51I | + |
| 2085/2086 | P56L/N85M/I104V | + |
| 2087/2088 | R48A | + |
| 2089/2090 | M40R | + |
| 2091/2092 | D49Q | + |
| 2093/2094 | P56L/E167A/L193V | + |
| 2095/2096 | R48E/P56L/R60V/S76D/E167A/K170T/L193V | + |
| 2097/2098 | P56L/S76G/Q80T/L193V | + |
| 2099/2100 | E101L | + |
| 2101/2102 | S125E | + |
| 2103/2104 | L27F/D49L/R171A | + |
| 2105/2106 | D49N | + |
| 2107/2108 | R60V | + |
| 2109/2110 | A98G | + |
| 2111/2112 | R171L/R186P | + |

“Levels of increased activity were determined relative to the reference polypeptide of SEQ ID NO: 1800 and defined as follows: ““+”” 1.1 to 2.9, ““++”” 2.9 to 5.0, ““+++”” 5.0 to 9.8.

### Example 45

### Improvements Over SEQ ID NO: 2078 in Conversion to Tetraphosphorylated Nucleotide

### Characterization of Shake Flask Purified Proteins for Improved 3OK Variants

[0448] SEQ ID NO: 2078 was selected as the parent 3OK enzyme. Six shake-flask variants including the parent SEQ ID NO: 2078 were grown, expressed, and purified as described in Example 7 method 2

[0449] Reactions were performed at 2 μL scale in 96-well format 200 μL BioRad PCR plates. Reactions included substrate, LiKAcPO₄, MgCl₂, AcK101, 25% 3OK solution, in Tris-HCl. The reactions were set up as follows: (i) all reaction components except for 3OK solution were pre-mixed in a single solution, and 1.5 μL of this solution was aliquoted into each well of the 96-well plate; (ii) 0.5 μL 3OK solution was added to each well. After briefly centrifuging to collect the contents in the bottom of each well, the reaction plates were heat-sealed with a peelable aluminum seal and incubated at 30° C. for indicated hours, then held at 4° C. until the reaction was quenched by 6 μL of MeOH. The reaction mixture was further diluted to 40 μM by water, then coupled with FAM labeled TdT oligo as described in Table 45.1. The reaction plates were heat-sealed with a peelable aluminum seal and incubated at 30° C. for 1 h and 95° C. for 2 min, then held at 4° C. until the reaction was quenched.

[0450] Reactions were quenched and analyzed by CE analysis as described in Example 14.

TABLE 45.1
Reaction, quench, and analytical properties

Reaction conditions:
Substrate - 1 mM fATP;
Reaction buffer - 100 mM Tris-HCl, pH 8, 50 mM LiKAcPO_{4,}
10 mM Magnesium chloride, 0.2 g/L AcK101;
3OK - 39 uM;
Reaction time - 16 hour
TdT coupling reaction conditions:
Substrate - 10 μM SEQ ID NO: 2130, 10 μM above
reaction mixture;
Reaction buffer - 20 mM TEoA, pH 7.8, 50 mM
CoCl₂, 0.001 U/μL IPP;
Enzyme: 4 μM SEQ ID NO: 2127
Quench conditions:
Reactions were quenched, and sample preparation as
described in Example 14

[0451] Activity relative to SEQ ID 2078 (Activity FIOP) was calculated as the fold-improvement of conversion of the variant divided by the conversion observed in the reaction with SEQ ID 2078 (where the conversion may be set as the average of replicates or else the highest single sample as appropriate).

[0452] Conversion was calculated as 3′PO4 product (SEQ ID NO: 2149) peak areas over the total of the unreacted substrate, byproduct, and 3′PO4 product (SEQ ID NO: 2149) peak areas. The results are shown in Table 45.2.

TABLE 45.2
Relative to SEQ ID NO: 2078

| SEQ ID | | Activity FIOP |
|---|---|---|
| NO: | Amino Acid Differences | Conversion Relative |
| (nt/aa) | (Relative to SEQ ID NO: 2078) | to SEQ ID NO: 2078 |
| 2113/2114 | S165Q | +++ |
| 2115/2116 | W100N | ++ |
| 2117/2118 | L193V | + |
| 2119/2120 | R48E | + |
| 2121/2122 | A52D | + |

Levels of increased activity were determined relative to the reference polypeptide of SEQ ID NO: 2078 and defined as follows: “+” 1.1 to 1.3), “++” 1.3 to 15, “+++” 1.5 to 1.7.

### Example 46

### Evaluation of Deoxynucleotide Triphosphate as Substrates as Determined by Conversion to the 3′PO4 Product

[0453] Activity of SEQ ID NO: 2078 with Deoxynucleotide Triphosphate

[0454] SEQ ID NO: 2078 was grown, expressed, and purified as described in Example 7 using method 2.

[0455] Reactions were performed at 2 μL scale in 96-well format 200 μL BioRad PCR plates. Reactions included substrate, LiKAcPO₄, MgCl₂, AcK101, 25% v/v 3OK solution, in Tris-HCl. The reactions were set up as follows: (i) all reaction components except for 3OK solution were pre-mixed in a single solution, and 1.5 μL of this solution was aliquoted into each well of the 96-well plate; (ii) 0.5 μL 3OK solution was added to each well. After briefly centrifuging to collect the contents in the bottom of each well, the reaction plates were heat-sealed with a peelable aluminum seal and incubated at 30° C. for indicated hours, then held at 4° C. until the reaction was quenched by 6 μL of MeOH. The reaction mixture was further diluted to 40 μM by water, then coupled with FAM labeled oligo described in Table 46.1. The reaction plates were heat-sealed with a peelable aluminum seal and incubated at 30° C. for 1 h and 95° C. for 2 min, then held at 4° C. until the reaction was quenched.

[0456] Reactions were quenched and analyzed by CE analysis as described in Example 14.

TABLE 46.1
All lysis, reaction, quench, and analytical properties

Reaction conditions:
Substrate - 1 mM dATP; 1 mM dGTP; 1 mM dCTP; 1
mM dTTP;
Reaction buffer - 100 mM Tris-HCl, pH 8, 50 mM LiKAcPO_{4,}
10 mM Magnesium chloride, 0.2 g/L AcK101;
3OK solution- 39 μM;
Reaction time - 16 hour
TdT coupling reaction conditions:
Substrate - 10 uM SEQ ID NO: 2130, 10 μM above
reaction mixture;
Reaction buffer - 20 mM TEoA, pH 7.8, 50 mM CoCl₂,
0.001 U/μL IPP;
Enzyme: 4 μM SEQ ID NO: 2127

[0457] Activity of SEQ ID 2078 (% Conversion) was calculated as 3′PO₄ product (SEQ ID NO: 2159, 2160, 2161, 2162) peak areas over the total of the unreacted substrate, byproduct, and 3′PO₄ product (SEQ ID NO: 2159, 2160, 2161, 2162) peak areas. The results are shown in Table 46.2.

TABLE 46.2
Percent conversion of deoxynucleotide triphosphates
to 3′ phosphorylated product by SEQ ID NO: 2078

| Product SEQ ID NO: | % Conversion |
|---|---|
| 2159 | +++ |
| 2160 | ++ |
| 2161 | ++ |
| 2162 | + |

Percent conversion in reactions with SEQ ID NO: 2078 are defined as follows:
“+” 0.5-1.0,
“++”1.0 to 4.0,
“+++” 4.0-6.0.

### Example 47

### Conversion of 2′Deoxyfluoro Adenosine (fA) to 3′Phosphorylated-fATP in a One-Pot Two-Step Biocatalytic Cascade Using Evolved Enzymes

[0458] Biocatalytic Conversion of fA to fATP

[0459] The enzymes SEQ ID NO: 2164 (nucleoside kinase variant), SEQ ID NO: 2166 (adenylate kinase variant), SEQ ID NO: 2124 (acetate kinase variant), and 3OK (SEQ ID NO: 2114) were expressed and purified as described in Example 7, method 2.

Biocatalytic Conversion of fA to fATP

[0460] To convert 2′deoxyfluoro adenosine (fA) to 2′deoxyfluro-adenosine triphosphate (fATP), each enzyme SEQ ID NO: 2164, SEQ ID NO: 2166, and SEQ ID NO: 2124 was added to a 1 mL reaction at a final concentration of 1 μM. The reaction contained 50 mM Tris (pH 8.0), 50 mM lithium potassium acetylphosphate, 10 μM ATP, 10 mM MgCl₂, and 10 mM nucleoside. The reaction was incubated in an Eppendorf Thermomixer at 30° C. and 400 rpm for 120 minutes. A 5 μL aliquot was then quenched and diluted 40-fold with 75% methanol and analyzed by HPLC using a Zorbax RR StableBond Aq, 3.0×150 mm, 3.5 μm (Agilent, #863954-314) column as a stationary phase and a mobile phase consisting of 50 mM potassium phosphate (pH 7) with 2 mM tetrabutylammonium hydrogensulfate (Solvent A), acetonitrile (solvent B), and water (Solvent C). Products were detected by UV absorption at 254 n. Based on this analysis, the quenched reaction contained 97% of fATP.

Purification of Crude fATP

[0461] To purify the crude fATP, 0.5 mL was removed from the crude reaction and placed in an Amicon Ultra—0.5 mL centrifugal filter which was then centrifuged at 14,000 rpm for 10 min. The filtrate was collected and purified by anion exchange chromatography using a pre-packed 5.0 mL Bio-Rad EconoFit Macro-Prep High Q anion exchange column. A 1.0 mL/min flow rate was used with a 0.25 to 0.4 M NH4HCO₃ buffer gradient over 90 mL (18 column volumes), collecting 3 mL fractions. The fractions were analyzed by UV-Vis absorbance at 260 nm to identify which contained nucleotide, and from each a 50 μL aliquot was transferred to a 96 well round bottom plate and dried overnight at room temperature on a vacufuge. These were reconstituted with 150 μL of water and analyzed by the same HPLC method above to identify the purest fractions, which were subsequently lyophilized and then reconstituted into 450 μL milli-Q water providing purified fATP in 6.1 mM concentration.

Biocatalytic Conversion of fATP to 3′Phosphorylated-fATP

[0462] To convert fATP to 3′phosphorylated-fATP, reactions were performed at 50 μL scale in a Costar round-bottom 96-well plate. Reactions contained 100 mM Tris (pH 8.0), 50 mM lithium potassium acetylphosphate, 10 mM magnesium chloride, 0.2 g/L SEQ ID NO: 2124, 40 μM SEQ ID NO: 2114, and 1 mM fATP from the preceding reaction, including two conditions both the purified material and as the crude reaction mixture. Following setup, reactions were then heat-sealed and mixed by briefly vortexing, then incubated in a Multitron Infors shaker at 30° C. and 400 rpm for 16 hours. Reactions were then quenched with the addition of 150 μL of methanol, sealed, and mixed by vortexing prior to HPLC analysis (as described above).

[0463] Activity of SEQ ID 2114 (% Conversion) was calculated as 3′PO₄ product peak areas over the total of the unreacted substrate, byproduct, and 3′PO₄ product and peak areas. The results are shown in Table 47.1.

TABLE 47.1
Conversion of fATP to 3′phosphorylated-
fATP by SEQ ID NO: 2114

| | Percent Conversion to |
|---|---|
| Source of fATP | 3′phosphorylated-fATP |
| Unpurified biocatalytic reaction mixture | + |
| Purified fATP | + |

Percent conversion in reactions with SEQ ID NO: 2114 are defined as follows: “+” 3.8-5.5.

### Example 48

### Ribonucleotide and Modified Nucleotide Activity Improvement by Evolved 3OKinases

[0464] SEQ ID NO: 10, SEQ ID NO: 372, SEQ ID NO: 496, SEQ ID NO: 1464, SEQ ID NO: 1800, SEQ ID NO: 2078, SEQ ID NO: 2114 were selected as the parents of 3OK enzymes. Seven shake-flask parent variants were grown, expressed, and purified as described in Example 7, method 2.

[0465] Reactions were performed at 2 μL scale in 96-well format 200 μL BioRad PCR plates. Reactions included substrate, LiKAcPO₄, MgCl₂, AcK101, 25% 3OK solution, in Tris-HCl. The reactions were set up as follows: (i) all reaction components except for 3OK solution were pre-mixed in a single solution, and 1.5 μL of this solution was aliquoted into each well of the 96-well plate; (ii) 0.5 μL 3OK solution was added to each well. After briefly centrifuging to collect the contents in the bottom of each well, the reaction plates were heat-sealed with a peelable aluminum seal and incubated at 30° C. for indicated hours, then held at 4° C. until the reaction was quenched by 6 μL of MeOH. The reaction mixture was further diluted to 40 μM by water, then coupled with FAM labeled TdT oligo as described in Table 48.1. The reaction plates were heat-sealed with a peelable aluminum seal and incubated at 30° C. for 1 h and 95° C. for 2 min, then held at 4° C. until the reaction was quenched.

[0466] Reactions were quenched and analyzed by CE analysis as described in Example 14.

TABLE 48.1
Reaction, quench, and analytical properties

Reaction conditions:
Substrate - 10 mM ATP, 10 mM GTP, 10 mM CTP, 10 mM UTP, 1 mM
fATP, 1 mM GTP-αS;
Reaction buffer - 100 mM Tris-HCl, pH 8, 50 mM LiKAcPO_{4,} 10 mM
Magnesium chloride, 0.2 g/L AcK101;
3OK - 39 uM;
Reaction time - 16 hour
TdT coupling reaction conditions:
Substrate - 10 μM SEQ ID: 2130, 10 μM above reaction mixture;
Reaction buffer - 20 mM TEoA, pH 7.8, 50 mM CoCl₂, 0.001 U/μL IPP;
TdT enzyme: 4 μM SEQ ID: 2128
Quench conditions: Reactions were quenched, and sample preparation as
described in Example 14

[0467] Ribo and modified activities of SEQ ID: 9/10, SEQ ID: 371/372, SEQ ID: 495/496, SEQ ID: 1463/1464, SEQ ID: 1799/1800, SEQ ID: 2077/2078, SEQ ID: 2113/2114: Activity (% conversion) were calculated as 3′PO₄ product peak areas (SEQ ID: 2145, SEQ ID: 2146, SEQ ID: 2147, SEQ ID: 2148, SEQ ID: 2149, SEQ ID: 2158 over the total of the unreacted substrate (SEQ ID: 2130, byproduct, and 3′PO₄ product peak areas. The results are shown in Table 48.2.

TABLE 48.2
conversion of nucleotide triphosphates
to 3′phosphorylated products

| | Relative Activities of 3OKinase | | | | | |
|---|---|---|---|---|---|---|
| SEQ ID | variants on nucleotide substrates | | | | | |
| No: (nt/aa) | CTP | UTP | GTP | ATP | GTP-αS | fATP |
| 9/10 | − | − | − | + | − | − |
| 371/372 | − | − | + | +++ | − | − |
| 495/496 | + | + | ++ | +++ | + | − |
| 1463/1464 | ++ | ++ | +++ | +++ | + | + |
| 1799/1800 | ++ | ++ | +++ | +++ | +++ | + |
| 2077/2078 | +++ | +++ | +++ | ++++ | +++ | + |
| 2113/2114 | +++ | +++ | +++ | ++++ | +++ | ++ |

Levels of relative activity were measured for the listed variants and defined as follows: “−” 0.00 to 0.99, “+” ≥1.0, “++” >10.0, “+++” >30.0, “++++” >70.0.

[0468] While the invention has been described with reference to the specific embodiments, various changes can be made and equivalents can be substituted to adapt to a particular situation, material, composition of matter, process, process step or steps, thereby achieving benefits of the invention without departing from the scope of what is claimed.

[0469] For all purposes in the United States of America, each and every publication and patent document cited in this disclosure is incorporated herein by reference as if each such publication or document was specifically and individually indicated to be incorporated herein by reference. Citation of publications and patent documents is not intended as an indication that any such document is pertinent prior art, nor does it constitute an admission as to its contents or date.

The application's sequence listing, which the Patent Office published only in electronic form, follows.

SEQUENCE LISTING (2166 sequences)

SEQ ID NO: 1 - DNA, 663 bp, synthetic construct
  misc_feature 1..663: note = Variant of 3'O-kinase
  source 1..663: mol_type = other DNA
atgagcgcgaattttctgattcaaaccgtgtctaacactccggaaaacatcttgtggcatcagtcaacggttacacgtgcccgccgcgagcagctgaatggccacaaatcctatgtcctctggttcacgggtttaagcggagcaggcaaaagtcgtcttgctcataccgtagaagaacgtctgcaccgcttagggtgccgcacctttgtgctggatggtgacaacgttcgtcatggcctgtgttcggatctggatttcagtgaggtgggtcgcaaggaaaatattcgtcgtatcggcgaagtcgcgaaattgatgatggaggtaggtctgattgttatgaccgcctttatctcgccatttcgtgcagaccgcgaagcggtgcgcaaccgtatgccttacggcgatttcctggagatttattgccaggtgagccttgaagcttgtgaagcccgcgacgtcaaagggctctacaagaaagcacgtgcgggccaaatcaagaattatacgggtattgattctgcgtacgaagcgccgctgaaaccggaactggttgtgaacactgagtgcttaaccttggaagaatcagtcagcgccgtactgcgcatgcttcacgaacgcggaatggtggtgcagggtggctccggccaccatcatcaccatcac

SEQ ID NO: 2 - protein, 221 aa, synthetic construct
  REGION 1..221: note = Variant of 3'O-kinase
MSANFLIQTVSNTPENILWHQSTVTRARREQLNGHKSYVLWFTGLSGAGKSRLAHTVEERLHRLGCRTFVLDGDNVRHGLCSDLDFSEVGRKENIRRIGEVAKLMMEVGLIVMTAFISPFRADREAVRNRMPYGDFLEIYCQVSLEACEARDVKGLYKKARAGQIKNYTGIDSAYEAPLKPELVVNTECLTLEESVSAVLRMLHERGMVVQGGSGHHHHHH

SEQ ID NO: 3 - DNA, 633 bp, synthetic construct
  misc_feature 1..633: note = Variant of 3'O-kinase
  source 1..633: mol_type = other DNA
atgcaccatcatcaccatcacgggggctccggcgcgctgcatgacgaaaacgtcgtctggcatagccatccggtcactgtgcaacaacgcgagctacaccacggtcatcgtggtgtagtgctgtggtttaccggcctctccgggtccggtaaatcaacggtcgccggggcgctggaggaggcgttacataaactcggcgtcagtacgtatctgctggatggcgacaatgttcgccacggattatgcagcgatctcggttttagcgatgccgatcgtaaagagaatatccgtcgcgtcggtgaagtggcgaatttgatggttgaagccggactggtggtgctgaccgcatttatctcgccacaccgcgccgaacgccagatggttcgcgaacgcgtaggagaagggcgctttatcgaagtgtttgtcgatacgccgctggcgatttgcgaagcccgcgatcccaaaggcttatataagaaagcgcgtgccggtgaactgcgcaactttacgggaatagattccgtttacgaagcgcctgaatcggcagaaattcatctcaatggtgaacaattagtaacaaatttggtacagcaattattagatctgttgagacagaacgatattatcagatcc

SEQ ID NO: 4 - protein, 211 aa, synthetic construct
  REGION 1..211: note = Variant of 3'O-kinase
MHHHHHHGGSGALHDENVVWHSHPVTVQQRELHHGHRGVVLWFTGLSGSGKSTVAGALEEALHKLGVSTYLLDGDNVRHGLCSDLGFSDADRKENIRRVGEVANLMVEAGLVVLTAFISPHRAERQMVRERVGEGRFIEVFVDTPLAICEARDPKGLYKKARAGELRNFTGIDSVYEAPESAEIHLNGEQLVTNLVQQLLDLLRQNDIIRS

SEQ ID NO: 5 - DNA, 648 bp, synthetic construct
  misc_feature 1..648: note = Variant of 3'O-kinase
  source 1..648: mol_type = other DNA
atgaggtatatagttgccttaacgggaggcattggcagtggcaagagtaccgttgccaatgcgtttgctgatctcggaattaacgtcattgatgccgatattattgcgcgtcaggtggttgaaccaggtgcacctgcgctacatgccattgctgatcactttggcgctaacatgattgctgctgatggaacattgcagcgccgggccttgcgcgagcggatcttcgccaacccggaagagaaaaactggcttaacgccctgctgcatccgctgattcagcaagagacgcaacaccagatccagcaagctacttccccctatgtactgtgggttgtgccattgctggtagaaaactcactgtataaaaaagcgaatcgagtgcttgtggtggatgtcagcccagaaacgcaacttaagcgcaccatgcagcgcgatgatgtaactcgcgagcatgtcgaacaaatccttgctgctcaggcaacgcgcgaagcccgccttgccgtggcagatgacgtcattgataataacggcgcaccggatgctatcgcatcggatgttgcccgcctgcacgcacactatttgcagcttgcgtcgcagtttgtctcacaggaaaaaccggggggctccggccaccatcatcaccatcac

SEQ ID NO: 6 - protein, 216 aa, synthetic construct
  REGION 1..216: note = Variant of 3'O-kinase
MRYIVALTGGIGSGKSTVANAFADLGINVIDADIIARQVVEPGAPALHAIADHFGANMIAADGTLQRRALRERIFANPEEKNWLNALLHPLIQQETQHQIQQATSPYVLWVVPLLVENSLYKKANRVLVVDVSPETQLKRTMQRDDVTREHVEQILAAQATREARLAVADDVIDNNGAPDAIASDVARLHAHYLQLASQFVSQEKPGGSGHHHHHH

SEQ ID NO: 7 - DNA, 639 bp, synthetic construct
  misc_feature 1..639: note = Variant of 3'O-kinase
  source 1..639: mol_type = other DNA
atgagcgatgtgattattggtttaaccggcggcgttgcgtctgggaaaagtctggccgaagcatgctttcgtgctctgggtatcgtagtagcagatgctgacgccgcagcacgcgatgctttggccgtgggttcaccgggacttgcagaggtcgtcgctacgttcggcccacaggttctgactcaagacggtcagctcgatcgtgccgctatgcgccgccgcatctttgcagatccgaccgccaaagcccagctggaagccattgttcatcctcgtgtgcgtacagccttacacgatgcttgtcgtaacgcagaatcgccgtatgcaatcgctagcattcccctgttggccgaaagtggcggccgctcagcatacccgtggctgcatcgcatcctgcttgtagaggctgacgctgccctgcgtctgaagcgtctttgccaacgcgacgggattgatatcgatttagcacagcgcatgctccaagcacaggcttcccaccgtgaacgcttggccattgccgatgacgtcctccgtaatgaaggttccccagatgcattagcagcaggagttgcccgcttggaccgtctctatcgtcgtttagctgctcgtggtggctccggccaccatcatcaccatcac

SEQ ID NO: 8 - protein, 213 aa, synthetic construct
  REGION 1..213: note = Variant of 3'O-kinase
MSDVIIGLTGGVASGKSLAEACFRALGIVVADADAAARDALAVGSPGLAEVVATFGPQVLTQDGQLDRAAMRRRIFADPTAKAQLEAIVHPRVRTALHDACRNAESPYAIASIPLLAESGGRSAYPWLHRILLVEADAALRLKRLCQRDGIDIDLAQRMLQAQASHRERLAIADDVLRNEGSPDALAAGVARLDRLYRRLAARGGSGHHHHHH

SEQ ID NO: 9 - DNA, 633 bp, synthetic construct
  misc_feature 1..633: note = Variant of 3'O-kinase
  source 1..633: mol_type = other DNA
atggcgtttaccattggtttaacaggagggatcgcaagcggcaaatcgactgtgagtgccatgatgcgtgaactgggtctgccggtcatcgatgctgacgaggcagcacgcgccgttgttcgtccaggcgaagaagcttatcgccagattgtagctgcgttcggtccgggcattcttcgtgccgatggcgagatcgatcgcgccaaattgggtgccatcgtgtttaacgacgaacaacaacgtaaggtgctgaatgcgattgtacatcctgcagtccgcaagaagatgctcgctgagaaagaagctcatatccgctcaggcgccaagacggttgtgctggatatcccgctgctgttcgaatccggattgacccattgggtcgacaaagtgctcgtggtgtacgtcgatgatgatgttcagttacgccgccttatggcacgtaacgggtttaccgaagaagaagctctggcccgcattcgttcacagtggcccatggccgagaaagttaaacgtgcagacgctgtaatcgacaataatggcacgattgaagaaacccgccgccagctgctggccattttacaccagtgggatgcactgggtaagggtggctccggccaccatcatcaccatcac

SEQ ID NO: 10 - protein, 211 aa, synthetic construct
  REGION 1..211: note = Variant of 3'O-kinase
MAFTIGLTGGIASGKSTVSAMMRELGLPVIDADEAARAVVRPGEEAYRQIVAAFGPGILRADGEIDRAKLGAIVFNDEQQRKVLNAIVHPAVRKKMLAEKEAHIRSGAKTVVLDIPLLFESGLTHWVDKVLVVYVDDDVQLRRLMARNGFTEEEALARIRSQWPMAEKVKRADAVIDNNGTIEETRRQLLAILHQWDALGKGGSGHHHHHH

SEQ ID NO: 11 - DNA, 618 bp, synthetic construct
  misc_feature 1..618: note = Variant of 3'O-kinase
  source 1..618: mol_type = other DNA
atgaaacgcattggtctgaccggcaatatcggatgcggcaagagcacggttgcgcagatgtttcgtgaacttggtgcatatgtgttggatgccgacaaactgatccattcgttctaccgcaaaggtcacccggtctatgaggaggtagtgaagacctttgggaaaggcattctggatgaagaaggcaacattgaccgtaagaaactggctgatatcgtgttcaaagacgaagaaaaattacgcaaattagaggagattactcatcgtgcgctgtacaaagaaatcgaaaagattacgaagaacctgtccgaagataccttgtttatcctcgaagccagtctgctggttgagaaaggtacctataagaattacgataaacttattgtcgtctacgcgccatatgaagtgtgtaaagaacgcgcaatcaaacgtgggatgtcagaagaagatttcgaacgccgctggaagaaacaaatgccgattgaggagaaagtgaaatatgcggactacgttatcgataactctggcagcattgaagagacgtataagcaggtaaagaaagtgtatgaagaactgacacgtgatccaggtggctccggccaccatcatcaccatcac

SEQ ID NO: 12 - protein, 206 aa, synthetic construct
  REGION 1..206: note = Variant of 3'O-kinase
MKRIGLTGNIGCGKSTVAQMFRELGAYVLDADKLIHSFYRKGHPVYEEVVKTFGKGILDEEGNIDRKKLADIVFKDEEKLRKLEEITHRALYKEIEKITKNLSEDTLFILEASLLVEKGTYKNYDKLIVVYAPYEVCKERAIKRGMSEEDFERRWKKQMPIEEKVKYADYVIDNSGSIEETYKQVKKVYEELTRDPGGSGHHHHHH

SEQ ID NO: 13 - DNA, 630 bp, synthetic construct
  misc_feature 1..630: note = Variant of 3'O-kinase
  source 1..630: mol_type = other DNA
atgaatccgaaagcgaagaacattgtttggcatgaaggcaaagtcaagaaagaggatcgcgaaaaactgctgggtcagaaaggcgtagtggtgtggctcaccggtttaagcggcgcagggaaatctacgatcgcccacgaattggaatggcgtctgcttgagatgggaaaactggcttatgttttggacggtgataacattcgccatggcctgaatagtgatctggggttttcgcctgaagaccgtaaagaaaacatccgccgcatttccgaagtggcgaagttattcgccgatgcgggtctgatcactattaccgcatttatctcaccataccgtgaggaccgtaaacgcgctcgtaatctccttaaagaaggcgagttcattgaagtctatgtaaaatgcccgctggatgtgctgatcgaacgtgatccgaagggtctgtacaagaaagccttagcgggcgagattaaagagtttacaggaattagcgcaccctatgaagaaccggaagacccagaactggttgttgagaccgataaagaaagcatcgaagaatcggtgaacaagatcttgaattacctgcgcgagaaaggcattatcggtggctccggccaccatcatcaccatcac

SEQ ID NO: 14 - protein, 210 aa, synthetic construct
  REGION 1..210: note = Variant of 3'O-kinase
MNPKAKNIVWHEGKVKKEDREKLLGQKGVVVWLTGLSGAGKSTIAHELEWRLLEMGKLAYVLDGDNIRHGLNSDLGFSPEDRKENIRRISEVAKLFADAGLITITAFISPYREDRKRARNLLKEGEFIEVYVKCPLDVLIERDPKGLYKKALAGEIKEFTGISAPYEEPEDPELVVETDKESIEESVNKILNYLREKGIIGGSGHHHHHH

SEQ ID NO: 15 - DNA, 639 bp, synthetic construct
  misc_feature 1..639: note = Variant of 3'O-kinase
  source 1..639: mol_type = other DNA
atgggtaatgcaaccaacattgtttggcacgatagcaaagtgacgaaagaagaccgtcagatctcgaagaagcataaaagtgccgccgtctggtttactggtttatcgggatctgggaaatccaccattacagtggctgtcgagaaagaattgcatcaactgggagtacacacctatcgcttagatggtgataacatccgcttcggcctgaataaagacctcggtttttctccggaagatcgtgcggagaacattcgccgcattggagaagttgcgaaactgatggtggacgcggggcttattacgctgaccgcattcatcagtccataccagaaagatcgcgataaggctcgtgaaattattggtgaagccgagtttatcgaagtctatgtgaaatgcagcttggagacgtgtgaaaatcgtgatccgaaaggcctgtacaagaaagcacgcgcgggagaaatcaaagagttcactggtattgacgcgccctatgaagaacctgtaaacccggaactcattattgataccgagaaactgagcctggccgaatcagttcagacagtgatccattaccttttagagaagggctttatcccgaagaccaacggtggctccggccaccatcatcaccatcac

SEQ ID NO: 16 - protein, 213 aa, synthetic construct
  REGION 1..213: note = Variant of 3'O-kinase
MGNATNIVWHDSKVTKEDRQISKKHKSAAVWFTGLSGSGKSTITVAVEKELHQLGVHTYRLDGDNIRFGLNKDLGFSPEDRAENIRRIGEVAKLMVDAGLITLTAFISPYQKDRDKAREIIGEAEFIEVYVKCSLETCENRDPKGLYKKARAGEIKEFTGIDAPYEEPVNPELIIDTEKLSLAESVQTVIHYLLEKGFIPKTNGGSGHHHHHH

SEQ ID NO: 17 - DNA, 687 bp, synthetic construct
  misc_feature 1..687: note = Variant of guanylate kinase
  source 1..687: mol_type = other DNA
atgcaccatcaccatcaccatgctctgccaactccagtcgttatttgtggtccatctggttctggtaagacaaccctgtataacaaactcctgaaagagttcccgggtgtcttccagctggttgcatctcatactacccgtcaaccacgtccaggtgaagagaacggtcgtgagttccactttatcaaccgtgaccagttccaggagaacatcaaacagggtgacttcctggaatgggcggagcattctggtaacctgtacggtacctctaagaaagcgctggaggaagttcaggcgaataacgttatcccgatcctggatatcgacacccagggtgttcgtaccgtgaagaaagcgtctctggaagcggtttacatctttatcaagccaccgtctatcaccgttctggaggaacgtctgcgttctcgtggtaccgaaaccgaggaagcgctgcagaaacgtctgtctgcagctccaaacgaactggaatacggtctgaaaccgggtaacttccagcatataatcaccaacgatgacctggacgttgcgtacgagaaactgaaaggtatcctgatcgattctcagatgccgctggctggtgcgaccggttccagttcctctgtggttaactctttcctggacaaaccggcggcttctgcgaccactgttaactcatcctctcaggac

SEQ ID NO: 18 - protein, 229 aa, synthetic construct
  REGION 1..229: note = Variant of guanylate kinase
MHHHHHHALPTPVVICGPSGSGKTTLYNKLLKEFPGVFQLVASHTTRQPRPGEENGREFHFINRDQFQENIKQGDFLEWAEHSGNLYGTSKKALEEVQANNVIPILDIDTQGVRTVKKASLEAVYIFIKPPSITVLEERLRSRGTETEEALQKRLSAAPNELEYGLKPGNFQHIITNDDLDVAYEKLKGILIDSQMPLAGATGSSSSVVNSFLDKPAASATTVNSSSQD

SEQ ID NO: 19 - DNA, 684 bp, synthetic construct
  misc_feature 1..684: note = Variant of guanylate kinase
  source 1..684: mol_type = other DNA
atgcaccatcatcaccatcacgggggctccggcatgaatctggttttaatgggtttaccgggcgcgggaaaaggtacccaggccgaaaagattgtggcagcttatggcatcccacatattagcacgggcgatatgtttcgtgcggcgatgaaagagggtactccgctgggattgcaagccaaacagtacatggatcgcggtgacctggtacctgatgaagtgaccatcggcattgtccgcgaacgtctctcgaaagatgactgtcaaaacggcttccttcttgacggttttccgcgtacagttgcccaagcagaagctttggagaccatgctcgcggatatcggccgcaaactcgactatgtgatccacattgatgtccgccaggatgtgttgatggaacgtttaacgggtcgccgcatctgtcgtaactgcggcgcaacctaccatcttgttttccacccacccgctaaaccgggcgtatgtgataagtgcggaggtgagttgtatcagcgtgcggacgacaatgaagccacggttgcaaaccgcctcgaagtcaatatgaaacaaatgaaaccgcttgtcgacttctacgaacagaagggctatttgcgcaacattaatggtgagcaggatatggagaaagtgtttgcagatattcgtgaattattaggtggtttagcccgt

SEQ ID NO: 20 - protein, 228 aa, synthetic construct
  REGION 1..228: note = Variant of guanylate kinase
MHHHHHHGGSGMNLVLMGLPGAGKGTQAEKIVAAYGIPHISTGDMFRAAMKEGTPLGLQAKQYMDRGDLVPDEVTIGIVRERLSKDDCQNGFLLDGFPRTVAQAEALETMLADIGRKLDYVIHIDVRQDVLMERLTGRRICRNCGATYHLVFHPPAKPGVCDKCGGELYQRADDNEATVANRLEVNMKQMKPLVDFYEQKGYLRNINGEQDMEKVFADIRELLGGLAR

SEQ ID NO: 21 - DNA, 684 bp, synthetic construct
  misc_feature 1..684: note = Variant of adenylate kinase
  source 1..684: mol_type = other DNA
atgcatcatcatcatcatcatagcagcagcgaaagtattcgtatggtactgattggtccgccgggtgcgggcaaaggcacccagtcgccgaatctgcaggaaagatttcatgcttgtcatctggggaccggcgatatgctgcgcagtcagcatgcaaaaggtacccagctgggtctggaagccaaaaaaattatggatcagggcggcttagtgtcagatgatattatggtgaatatgattaaagatgaactgaccaataatccggcttgcaaaaatggctttattctggatggctttccgcgcaccattccgcaggcgatgaaactggagcagatgctgaaagaacagggtaccccactggaaaaagccgttgaactgaaaattgatgatgagctgctgcctgcacgcattaccggtcgcctgattcatccggcttcaggccgttcttatcataaaatttttaatccgccgaaagaagatatgaaagatgatgtgaccggtgaagcactggttcagcgttcagatgataatgcagatgcactgaaaaaacgtctggccgcctatcataagcagaccgaaccggttgtggatttttataaaaaagctggtatttgggcgggcgttgatgcgagtcagccggtagccaccgtttgggccgatattctgaataaactgggtaaagat

SEQ ID NO: 22 - protein, 228 aa, synthetic construct
  REGION 1..228: note = Variant of adenylate kinase
MHHHHHHSSSESIRMVLIGPPGAGKGTQSPNLQERFHACHLGTGDMLRSQHAKGTQLGLEAKKIMDQGGLVSDDIMVNMIKDELTNNPACKNGFILDGFPRTIPQAMKLEQMLKEQGTPLEKAVELKIDDELLPARITGRLIHPASGRSYHKIFNPPKEDMKDDVTGEALVQRSDDNADALKKRLAAYHKQTEPVVDFYKKAGIWAGVDASQPVATVWADILNKLGKD

SEQ ID NO: 23 - DNA, 684 bp, synthetic construct
  misc_feature 1..684: note = Variant of adenylate kinase
  source 1..684: mol_type = other DNA
atgcatcatcatcatcatcatagcagcagcgaaagtattcgtatggttctgattggtccgccgggtgcgggcaaaggcacccaggcgccgaatctgcaggaaagatttcatgcttgtcatctggggaccggcgatatgctgcgcagtcagattgcaaaaggtacccagctgggtctggaagccaaaaaaattatggatcagggcggcttagtgtcagatgatattatggtgaatatgattaaagatgaactgaccaataatccggcttgcaaaaatggctttattctggatggctttccgcgcaccattccgcaggcggaaaaactggatcagatgctgaaagaacagggtaccccgctggaaaaagccgttgaactgaaaattgatgatgagctgctgcctgcacgcattaccggtcgcctgattcatccggcttcaggccgttcttatcataaaatttttaatccgccgaaagaagatatgaaagatgatgtgaccggtgaagcactggttcagcgttcagatgataatgcagatgcactgaaaaaacgtctggccgcctatcataagcagaccgaaccggttgtggatttttataaaaaaaccggtatttgggcgggcgttgatgcgagtcagccgccggccaccgtttgggccgatattctgaataaactgggtaaagat

SEQ ID NO: 24 - protein, 228 aa, synthetic construct
  REGION 1..228: note = Variant of adenylate kinase
MHHHHHHSSSESIRMVLIGPPGAGKGTQAPNLQERFHACHLGTGDMLRSQIAKGTQLGLEAKKIMDQGGLVSDDIMVNMIKDELTNNPACKNGFILDGFPRTIPQAEKLDQMLKEQGTPLEKAVELKIDDELLPARITGRLIHPASGRSYHKIFNPPKEDMKDDVTGEALVQRSDDNADALKKRLAAYHKQTEPVVDFYKKTGIWAGVDASQPPATVWADILNKLGKD

SEQ ID NO: 25 - DNA, 693 bp, synthetic construct
  misc_feature 1..693: note = Variant of adenylate kinase
  source 1..693: mol_type = other DNA
atgcaccatcatcaccatcacgggggctccggcatgatggcatatctggtgtttttaggtccgccgggcgcgggaaaaggtacctacgccaaacgcattcaggaaaagactggcatcccacatattagcacgggcgatatcttccgtgacatcgtcaagaaagagaacgatgaactgggcaagaagattaaagaaatcatggagaaaggtgaactcgttccagatgaactggtgaatgaggtagtaaaacgccgcctgtcggagaaagactgcgaaaaaggctttattttggatggttatccgcgtaccgttgctcaagcggaattcctggacagttttcttgaatcccagaacaaacagttgacagccgccgtgctgttcgatgtccccgaagatgttgttgtgcaacgtttaacctctcgccgcatctgtccgaaatgcgggcgtatctacaatatgatttcactgccaccaaaagaagacgagctgtgtgacgattgcaaagtcaaattagtacagcgtgatgatgataaggaagaaacggttcgtcaccgctataaagtctaccttgagaagacccagccggtcattgactattatggcaagaaaggtattctcaaacgcgtagatggcacgattggaatcgacaacgttgttgcagaagtcctgaagattattggttggagcgataag

SEQ ID NO: 26 - protein, 231 aa, synthetic construct
  REGION 1..231: note = Variant of adenylate kinase
MHHHHHHGGSGMMAYLVFLGPPGAGKGTYAKRIQEKTGIPHISTGDIFRDIVKKENDELGKKIKEIMEKGELVPDELVNEVVKRRLSEKDCEKGFILDGYPRTVAQAEFLDSFLESQNKQLTAAVLFDVPEDVVVQRLTSRRICPKCGRIYNMISLPPKEDELCDDCKVKLVQRDDDKEETVRHRYKVYLEKTQPVIDYYGKKGILKRVDGTIGIDNVVAEVLKIIGWSDK

SEQ ID NO: 27 - DNA, 675 bp, synthetic construct
  misc_feature 1..675: note = Variant of adenylate kinase
  source 1..675: mol_type = other DNA
atgcaccatcatcaccatcacgggggctccggcatgcgcattattttattaggtgctcctggcgcaggaaaaggaacccaggcgcagtttatcatggaaaaatatggtatcccgcaaattagcacgggcgatatgttgcgtgccgccgtgaaaagtggttcggagcttggcaagcaggcgaaagacatcatggatgcgggtaaactcgttactgatgaactcgtcattgcgttggtgaaggaacgcatcgctcaagaagactgtcgtaatggcttccttcttgatggctttccacgtaccattccgcaggcagacgccatgaaagaggcagggatcaatgtagattacgtcttggaattcgatgttccggacgagctcattgtggatcgcatcgtaggtcgccgtgttcatgctccctctgggcgcgtgtatcacgtcaagtttaacccgccgaaagtggaaggcaaagacgatgttacaggcgaggaattaaccacccgtaaagatgatcaggaagaaacggtgcgcaaacgtttggtcgagtaccatcaaatgactgcaccactcattgggtattattccaaagaagcggaagccggcaatacgaagtacgcgaaagttgacggtaccaaacctgtagccgaagtgcgcgcggaccttgagaagatcttaggt

SEQ ID NO: 28 - protein, 225 aa, synthetic construct
  REGION 1..225: note = Variant of adenylate kinase
MHHHHHHGGSGMRIILLGAPGAGKGTQAQFIMEKYGIPQISTGDMLRAAVKSGSELGKQAKDIMDAGKLVTDELVIALVKERIAQEDCRNGFLLDGFPRTIPQADAMKEAGINVDYVLEFDVPDELIVDRIVGRRVHAPSGRVYHVKFNPPKVEGKDDVTGEELTTRKDDQEETVRKRLVEYHQMTAPLIGYYSKEAEAGNTKYAKVDGTKPVAEVRADLEKILG

SEQ ID NO: 29 - DNA, 1806 bp, synthetic construct
  misc_feature 1..1806: note = Variant of pyruvate oxidase
  source 1..1806: mol_type = other DNA
atgcaccatcatcatcatcatggcggtagcggcatgagcgaaaacatgatttcagcaagttccgcgatgctgaatgtgctcaaaacctggggcgtcgatacgatctatggtattccgtcgggaactctgggcagcttaatggacgctctggccgaggatgatgatatccgctttttgcaggttcgtcatgaagaagtaggtgcgcttgcagcagtgatgcaaaacaaattcggtggtccgctcggagttgctgtgggttctggtggtcctggagcgacccacctgattaatggcgtatacgacgcggccatggataacacaccgtttttagctatccagggcagtcgcccgaatgacgagctgaacctcgatgcgttccaggaactgaaccaaaaccccatgtattcgggcattgccgtgtacaataagcgtgttgcctatccggaacagctgccgaaagtcatcgacgaagcagcacgcgcggctgtcacccgtaaaggaccagcggtggttgagattcctgtgaactttggctgggtagaaatcccggaagatagctattacggttccggcgagtatcagcgcgactacattgcctctgcgttgaatgaagaagatatcgatcaagccgtcgagattctgaataatgcagaacgtcccgtgatttatagcggtatcggcgcgaacgaacatggtgatcttgtttcgaaattagcccagaagattaaagctccgatcattacgacgggaaagaacttcgactcctttaactacgatgatgaagcgctgaccggctcagcatatcgcgtgggttggaaaccagcgaatgaggtcgtctttgaagccgacactgtgttgttcctgggcagcaactttccgttcgccgagacctaccaggcgtttaagaatgtggacaaattcatccaagttgatattgatccgcacaaactgggcaaacgtaacgctcttgacgcgagtatcctgggtgatgcaggagaagctgcccaggcgatctatgacaaagttgatgccgtagaagaatctgcatggtggaatgcgaacattaagaacaacaagaattggcgcgagtacatggataaactcgaacagaagacagaaggcgatctgcaactgtatcaggtgtataatgccattaacaatcatgcagacgaggatgcgatttacagcatcgacgttggtaactcaacccaaacgagcattcgtcacttgcatatgaaccccaagaatatgtggcgtacttcaccgttatttgccactatgggcatcgcactgcctggtggtattgcggcgaagaaagataatccaaaccgtcaggtctggaatatcatgggagatggcgcctttaacatgacgtatccggacgtggtgaccaacgttcagtacgatctgccggtcattaatgtggtgttctcgaacaccgaatatgcgtttatcaagaataaatacgaggatacgaacaaacatcttttcggcaccgactttattgatgttgactacgctaagattggtgaagctcaaggcgcagtcggctatactgtaaatcgcatcgaagatatggacgaagtaatgcgtaaagccgttgaggacaacaaagcgggtaagacagtagtagtggatgccaagattacccctgatcgcccaatcccggtcgaagtgttagaactcgatccgaaagtttcctccgaggaggacatcaaagccttcaaagagaaatatgaagcggaagatttggtgccctttcgtctgtttctggaagaagaaggactggaatctcgcgcgattaag

SEQ ID NO: 30 - protein, 602 aa, synthetic construct
  REGION 1..602: note = Variant of pyruvate oxidase
MHHHHHHGGSGMSENMISASSAMLNVLKTWGVDTIYGIPSGTLGSLMDALAEDDDIRFLQVRHEEVGALAAVMQNKFGGPLGVAVGSGGPGATHLINGVYDAAMDNTPFLAIQGSRPNDELNLDAFQELNQNPMYSGIAVYNKRVAYPEQLPKVIDEAARAAVTRKGPAVVEIPVNFGWVEIPEDSYYGSGEYQRDYIASALNEEDIDQAVEILNNAERPVIYSGIGANEHGDLVSKLAQKIKAPIITTGKNFDSFNYDDEALTGSAYRVGWKPANEVVFEADTVLFLGSNFPFAETYQAFKNVDKFIQVDIDPHKLGKRNALDASILGDAGEAAQAIYDKVDAVEESAWWNANIKNNKNWREYMDKLEQKTEGDLQLYQVYNAINNHADEDAIYSIDVGNSTQTSIRHLHMNPKNMWRTSPLFATMGIALPGGIAAKKDNPNRQVWNIMGDGAFNMTYPDVVTNVQYDLPVINVVFSNTEYAFIKNKYEDTNKHLFGTDFIDVDYAKIGEAQGAVGYTVNRIEDMDEVMRKAVEDNKAGKTVVVDAKITPDRPIPVEVLELDPKVSSEEDIKAFKEKYEAEDLVPFRLFLEEEGLESRAIK

SEQ ID NO: 31 - DNA, 1878 bp, synthetic construct
  misc_feature 1..1878: note = Variant of pyruvate oxidase
  source 1..1878: mol_type = other DNA
atgcaccatcatcatcatcatggcggtagcggcatggcgaaaaatgtgattcagtttggtttcgatgctgcaaccgccaaccaacataaagaaggcgcgatcaaggcgggtgttgccacggtcaaagtactggaaagctggggcgtgaagcacatttttggtattccgggaggatcgatcaactccttaatggacgcactgtatgttgagcgcgataatatcgactacgtgcaggtccgtcatgaagaagtcggcgcgttggccgctagtatgcacgcgaaatatactggccatattggtgtttgcttcggctcagcaggtccaggtggcacccatacactgcagggcctttacgatgctcgtgaggagcacgtaccgctgctcgcactgatcgggcaatttggaacggcgggcttgaactgggataccttccaggaaatgaacgaaaatcccatttatgctgatgtcgcaatctacaatcgccaggtttctaccgctgcccaaatgcctcatgtgattgatgaagcgattcgccaggcgtatgccaagaacggtgtggctgtcgtacaaatcccggttgatttaggttgggtggacattccggaagatggctggtatagcgcagcaaatgcaagccgtcgttacccaaacccgactctggatgagcgcgacatcgatgccgccgtggaaattctgaaccacgctgaacgccctgtcgtctttgcaggcattggtacgcgtggcgagcatcagatcgttatggacctgtgtcgcaagatcaaagctccgcttgccaataccggaatttcgtttgataacttcccgtccgactttgaagccctcctgggctctcccaatcgtgtgagtacaaaaccaagcgtggaatgcttcccggaggcagataccgttctgtttgtcggtaacaactatcctttcgctgaagtgtcaaatctgtttaagaatgttcgccactttatccagatcgatattgatccgtccaaattgggtaaacgtcatcgtacggacgtagccattttaggcgatgcaggcgatgctcttcgcgccatccacgccaaagtagacgagaaaccaggtactggatggtggcgtgcaaacctggaaaacgttgcaaattggcgcgaatacgtgaccaaactggaaaagaaacgcgaaggcgatctccagctgtatcaagtgtacgacgctattaacgccgtagcagaggaagacgccattttctcggtcgatgtgggtgatgttacgcagaccagcatccgtcatttgcatatgaatccgaaacaaatgtggcgcaccagtagtctgtttgctacaatgggcgtcggtattccgggcgcaatctctgccaaattagattttcccgatcgtcaggtgtggaacttagctggtgacggcggattcaacatgacgatgcaggatttggcaactgccgtgcagtatgatctcccaacccttcacgttgtcttcaacaaccaacaatacggttttatcaaagacgaacaggaggacacgaatcttggctatttgggtgtgcatttcatggacattgactatgccaaattagctgaagcaatgggagcagtaggccacaccgtgaatacgattgatgaagcccatgctgtcttagcacaagccgctcaggaggtacgcgatggcaaagttgtggttgtcaatgcccgtattaccaacgaacgtccgttgcctgcagaaatgctcgaacttgaaccgcgcctcttctcagctgagcgcatcgaggcctttaagaaacgttacgaagcagaggatttgaaaccgctcagctattttttggagaaagaaggtttagatgcccgcattgaagtggttgaacagggcggcttc

SEQ ID NO: 32 - protein, 626 aa, synthetic construct
  REGION 1..626: note = Variant of pyruvate oxidase
MHHHHHHGGSGMAKNVIQFGFDAATANQHKEGAIKAGVATVKVLESWGVKHIFGIPGGSINSLMDALYVERDNIDYVQVRHEEVGALAASMHAKYTGHIGVCFGSAGPGGTHTLQGLYDAREEHVPLLALIGQFGTAGLNWDTFQEMNENPIYADVAIYNRQVSTAAQMPHVIDEAIRQAYAKNGVAVVQIPVDLGWVDIPEDGWYSAANASRRYPNPTLDERDIDAAVEILNHAERPVVFAGIGTRGEHQIVMDLCRKIKAPLANTGISFDNFPSDFEALLGSPNRVSTKPSVECFPEADTVLFVGNNYPFAEVSNLFKNVRHFIQIDIDPSKLGKRHRTDVAILGDAGDALRAIHAKVDEKPGTGWWRANLENVANWREYVTKLEKKREGDLQLYQVYDAINAVAEEDAIFSVDVGDVTQTSIRHLHMNPKQMWRTSSLFATMGVGIPGAISAKLDFPDRQVWNLAGDGGFNMTMQDLATAVQYDLPTLHVVFNNQQYGFIKDEQEDTNLGYLGVHFMDIDYAKLAEAMGAVGHTVNTIDEAHAVLAQAAQEVRDGKVVVVNARITNERPLPAEMLELEPRLFSAERIEAFKKRYEAEDLKPLSYFLEKEGLDARIEVVEQGGF

SEQ ID NO: 33 - DNA, 1824 bp, synthetic construct
  misc_feature 1..1824: note = Variant of pyruvate oxidase
  source 1..1824: mol_type = other DNA
atgcaccatcatcatcatcatggcggtagcggcatgaccgaagaaaagaaaactattgaagcgggcgtggcagccgtcaaagttatggagaaatggggtgtgaagaacatctatggactgccggctggcacgctcaatagctggatggatgcgctgaagaaagaggaggaaaacatccgctttattcaggtacgtcatgaagaagttggtgccttagcagcgagtatgcacgccaaattcaccggcgaaattggtgtcgctcttggctcggcaggtccaggagctacacatctgatgaatggtctgtacgacgcccgcgaagatggagtgccggttttggcaatcatcggccaacgtgccgagaaagagattaacatggacgcttttcaggaaatgaatcacaaccctctgttcgcagatgtaaccgtgtataatcgccgtgtcgcttacccggaacagttgcccaagattattgatgaagccatccgtacggcagttgcccgcaaaggcattgctgccgtagaagttccggtggactatggttgggtcgagatcgatgatgattcttggtacgcctccgcagacagccataaacaaatgccacacccggtgctgaacgagaaagaaattgatgaggccgtgaagatccttgagaaagcagaacgccctgtgatctatgctggcattggcacccgtggttcaggcgaagacgttatggatttaagccgcaaactgaaagctccggtcgcaatcacgggtattaactacgacacttttccgcatgatttcgaagcctttctgggtagtgcacatcgtgtgtcgcgcaaaccagctgtcgaagcctttgaagaagccgatgtagtactgttcgcaggctccaattatccgttttctgaagttaccgccattttcgacaacatcgacaaatttatccagattgatattgatcctcacaaactcggaaagcgtcataagacagatgtggctattttaggtgatgcaggcgaagccatccgcatgatgaccgacaaactgagcgagaaagaagaaacggcatggtatcgtgccaatctcaagaacattgagaactggaagacctacactgataaactggagcagaagaaagaaggcgaactgcaattctaccaggcttatcacgtgatcaatcaggttgcagacgacgatgccatctattcagtcgatgtgggtaataccacgcaaaccagtgttcgccatttgcacatgacaccgaagaacatgtggcgtacttctggcgtgtttgctaccatgggtaatggcttaccgggagctattgcagcaaaagccgattttcccgaacgtcaggtctggaacttgacgggtgatggcgccttcagcatggtaatgcaggacattattacaacccgccaatatcagctgcccatgatcaacgtggtgttctccaatacggaatacgcctttatcaaagatgaacaagaggacaccaaccatgcatactttggcgtcgatttcaaaggagtagactacgctaagattgcagaagctcagggtgccatcggctatactgttcgcgagattaatgaactggacaaagtgtttaagaaagccgtcgaacatgagaaagcaggtcgtaccgttgtggtggatgtcaaagtttcgacggatcgcccaattccggtagaagctctggaacttgatccgcgtcgttttagcgaagaagaaattcgcgccttcaagaaacgctttgaggcagaggaactggaacctttccttacctttctggaacaggagggcctggaatcacgtgcttcggaggagaaatgc

SEQ ID NO: 34 - protein, 608 aa, synthetic construct
  REGION 1..608: note = Variant of pyruvate oxidase
MHHHHHHGGSGMTEEKKTIEAGVAAVKVMEKWGVKNIYGLPAGTLNSWMDALKKEEENIRFIQVRHEEVGALAASMHAKFTGEIGVALGSAGPGATHLMNGLYDAREDGVPVLAIIGQRAEKEINMDAFQEMNHNPLFADVTVYNRRVAYPEQLPKIIDEAIRTAVARKGIAAVEVPVDYGWVEIDDDSWYASADSHKQMPHPVLNEKEIDEAVKILEKAERPVIYAGIGTRGSGEDVMDLSRKLKAPVAITGINYDTFPHDFEAFLGSAHRVSRKPAVEAFEEADVVLFAGSNYPFSEVTAIFDNIDKFIQIDIDPHKLGKRHKTDVAILGDAGEAIRMMTDKLSEKEETAWYRANLKNIENWKTYTDKLEQKKEGELQFYQAYHVINQVADDDAIYSVDVGNTTQTSVRHLHMTPKNMWRTSGVFATMGNGLPGAIAAKADFPERQVWNLTGDGAFSMVMQDIITTRQYQLPMINVVFSNTEYAFIKDEQEDTNHAYFGVDFKGVDYAKIAEAQGAIGYTVREINELDKVFKKAVEHEKAGRTVVVDVKVSTDRPIPVEALELDPRRFSEEEIRAFKKRFEAEELEPFLTFLEQEGLESRASEEKC

SEQ ID NO: 35 - DNA, 1821 bp, synthetic construct
  misc_feature 1..1821: note = Variant of pyruvate oxidase
  source 1..1821: mol_type = other DNA
atgcaccatcatcatcatcatggcggtagcggcatgagtgataaaggtaagaagattgaagcgggcgtggcagctgtcaaagttctggaaagctggggagtgaaacatgtatatggtatcccggccggctcccttaactcgtggatggacgcgctgaataaagagaaagaaagcatccagtttattcaagttcgccacgaagaagtgggcgccttagcagcgtctatgcatgccaaattcaccggtgagattggcgtagctctgggttcagcagggccaggagcaacgcacttgatgaacggcctctacgatgcccgtgaggatcatgtccctgttctggctatcatcggtcagcgcagtgaacgtgagattaatatggacgcctttcaggaaatgaaccaaaatccggtgttcgctgatgtcgccgtgtataaccgccgcgttgcataccccgaacagctgccgaagattattgacgaagctgtgcgtacagccatcgcaaagaaaggcgttgcagccgtcgaagtaccggtggattatgggtgggtggagatcgatgataccgactggtactctagcgctaacgcctatcgtaattatttatacccagcagtcgacgagaaagatattgatgaagctgctgcactgctggaacaagccaaacgcccggtgatttacgccggtatcggcactcgtgggaacggtgacgccgttatggaactctcgcagaaacttaaagcacctgttgctgtatccggcatcaattatgatacctttccgcacgatttcgaagcactgctgggctcagcctatcgcgtcagccgtaaacccgctgtggaggtgtttgatgaagccgacgtcgttttgtttgcaggttcgaactatccgttcgctgaagtaagcgatacgttcaaacataccaagaagtttattcagattgacatcgatccacagaaattaggaaaacgccataagactgatgtggcaattttagcagatgccggtgatgctatccgtgccatcacgaagaagatttccgagaaaccggaaaccagttggtaccgcgccaatctgaacaacattaagaactggaagacatacaccgacaaactggaacagaaaacggacggcgagctgcaattctatcaggtgtacaacgccatcaatcaagtagcagacgaaaatgctctttattctgttgatgtcggcgataccacccagactagcgtgcgtcacttgcatctgacgccgaagaatatgtggcgcacctcggcactctttgctacaatggggaacggcctgcctggtgcaattgctgccaaagccgactttccggatcgtcaagcatggaatttggctggagatggtgcctttgccatggttatgcaggacattgtgactgcagtccagtatgaactgccagttatcaacgtggtgttctcaaatacgcaatacggcttcatcaaagatgaacaggaggataccaaccacgactattatggcgtgttctttaatgaagtcgatttcgccaagattgcagaagctcaaggagccgttggttacaccgtaacggagatttcccagctgaagaaagtctttgagaaagcagttgaagacgagaaagctggccgcaccgtgctcatcgacgtcaagattagtcgtgatcgcccgttaccagctgaagccctgaaacttgaaccggccctgtacagcaaagaagaaattcaggcctttaaagagcgtttcgaagcagaagaactggaacccctgagctattttctccagaaagaaggtctggagtctaacttgcagcaagaaaag

SEQ ID NO: 36 - protein, 607 aa, synthetic construct
  REGION 1..607: note = Variant of pyruvate oxidase
MHHHHHHGGSGMSDKGKKIEAGVAAVKVLESWGVKHVYGIPAGSLNSWMDALNKEKESIQFIQVRHEEVGALAASMHAKFTGEIGVALGSAGPGATHLMNGLYDAREDHVPVLAIIGQRSEREINMDAFQEMNQNPVFADVAVYNRRVAYPEQLPKIIDEAVRTAIAKKGVAAVEVPVDYGWVEIDDTDWYSSANAYRNYLYPAVDEKDIDEAAALLEQAKRPVIYAGIGTRGNGDAVMELSQKLKAPVAVSGINYDTFPHDFEALLGSAYRVSRKPAVEVFDEADVVLFAGSNYPFAEVSDTFKHTKKFIQIDIDPQKLGKRHKTDVAILADAGDAIRAITKKISEKPETSWYRANLNNIKNWKTYTDKLEQKTDGELQFYQVYNAINQVADENALYSVDVGDTTQTSVRHLHLTPKNMWRTSALFATMGNGLPGAIAAKADFPDRQAWNLAGDGAFAMVMQDIVTAVQYELPVINVVFSNTQYGFIKDEQEDTNHDYYGVFFNEVDFAKIAEAQGAVGYTVTEISQLKKVFEKAVEDEKAGRTVLIDVKISRDRPLPAEALKLEPALYSKEEIQAFKERFEAEELEPLSYFLQKEGLESNLQQEK

SEQ ID NO: 37 - DNA, 1812 bp, synthetic construct
  misc_feature 1..1812: note = Variant of pyruvate oxidase
  source 1..1812: mol_type = other DNA
atgcaccatcatcatcatcatggcggtagcggcatgaccgatggcaagacgaaagttagcactgcgatgctgaaagtattagctggttgggacgtggataccatttatggaatcccgtctggtacactggcaccattgatggaagcccttggcgagcaggaagaaaccgacatcaaatttctgcaagtcaaacatgaggaagttggtgcgatggccgcagtaatgcagtggaaatacaagggcaaactcggagtttgcgtgggttcaggcggtccgggcgctactcacttagcgaacggcctgtatgatgccgccatggataatacccctgtcctggcaattctgggaagtcgcccgcagcgtgaactgaacatggatgcgttccaagagttgaatcagaaccccatgtttgcgaatattgcggtgtacaaccgccgcgtggcctatgcagaacagcttccgaaactcgtcgacgaagctatccgtacggccatttcgaaacgtggtgttgcggtgctggaagttccaggcgatttcggctttcatgagatcgcaaatgacgctttctatagcacgggtcactcctaccgtgattatgtgagttcggcgattaacgaagccgatatcgacgctgcggtcgaagtgctgaacaacagcgatcgcaccgtaatttacgcaggcatcggtacaatgggccatggtccggcggttcaagaactttctcgcaagattaaagcgcctatcattaccacgggcaagaattttgagacctttgaatgggacttcgaggccctgactggttcaacgtatcgtgtgggttggaaaccggcaaatgaagccgtcaaagaagctgataccgtgttgtttgttggcagcaacttcccgtttgcggagattgaaggtaccttctcaaatatcaagaactttattcagatcgataacaatcccacaatgttaggaaaacgccacaatgcagacgtagcgattttaggcgatgccggtgaagcggtgcatagtctccttgagaaagtcactccagtggaagaatctgcctggtggaacgcgaacgtcaagaatgttcagaactggcgtgactacatgaacaaattggagcagaaagaaagcggcgatctgcaactgtatcaggtgtacaatgccatcaacaaatatgcagatgaagacgctatttattcgacggatgtaggcaattccacccaaaccagcattcgccatcttcacatgacgccgaagaatatgtggcgtacctcgccgttatttgcgacgatgggtatcgccttacctggcggcattgcagcgaagaacgtttacccagatcgccaggcttggaacttgatgggtgatggagcgttcaatatggtgtatccggacgtcgtaactaacgtgcgttacaatatgccggttatcaacgtggtgtttaccaacacagagtacggtttcattaagaacaaatatgaagataccaataagaacacgtttggcaccgaattcactgacgtcgattatgcaatgatcggtcaagcacagggcgctgtgggatttacggtctcacgcattgaagacatcgatcaggtaatggccgatgcggtcaaagcgtacaaagagggtaaaaccgtggttattgacgccaagatcaccaaagatcgtcccattccggtagaaacactcaaattagacccgagcctttatagtgccgaagagatcaaagcgtacaaagagaaatatgaagctgaagaactcgttccattctccgagttcttgaaagcagaaggccttacgagcaaagtgtctaag

SEQ ID NO: 38 - protein, 604 aa, synthetic construct
  REGION 1..604: note = Variant of pyruvate oxidase
MHHHHHHGGSGMTDGKTKVSTAMLKVLAGWDVDTIYGIPSGTLAPLMEALGEQEETDIKFLQVKHEEVGAMAAVMQWKYKGKLGVCVGSGGPGATHLANGLYDAAMDNTPVLAILGSRPQRELNMDAFQELNQNPMFANIAVYNRRVAYAEQLPKLVDEAIRTAISKRGVAVLEVPGDFGFHEIANDAFYSTGHSYRDYVSSAINEADIDAAVEVLNNSDRTVIYAGIGTMGHGPAVQELSRKIKAPIITTGKNFETFEWDFEALTGSTYRVGWKPANEAVKEADTVLFVGSNFPFAEIEGTFSNIKNFIQIDNNPTMLGKRHNADVAILGDAGEAVHSLLEKVTPVEESAWWNANVKNVQNWRDYMNKLEQKESGDLQLYQVYNAINKYADEDAIYSTDVGNSTQTSIRHLHMTPKNMWRTSPLFATMGIALPGGIAAKNVYPDRQAWNLMGDGAFNMVYPDVVTNVRYNMPVINVVFTNTEYGFIKNKYEDTNKNTFGTEFTDVDYAMIGQAQGAVGFTVSRIEDIDQVMADAVKAYKEGKTVVIDAKITKDRPIPVETLKLDPSLYSAEEIKAYKEKYEAEELVPFSEFLKAEGLTSKVSK

SEQ ID NO: 39 - DNA, 1779 bp, synthetic construct
  misc_feature 1..1779: note = Variant of pyruvate oxidase
  source 1..1779: mol_type = other DNA
atgcaccatcatcatcatcatggcggtagcggcatgagcaacaaaattgatggttgggtggcgggcctgaagaccatcgaaagttggggagtcgagaatatctatggtattccggcaggctcgttgaactccttaatggacgccctggagaaagagaaagaaaatatcaactttattcaggttcgccatgaagaagcgggtgctcttgcagcctctatgcacgcgaaattcacgggcaagattggagtatgcgtggggtcagctggtccaggcgcaactcatctgtacaatggcctctatgatgccaaatttgataacgtgccggtacttgcgatcttgggtcaacgtcctttaagcgaagcgaacatggacatgttccaggaaatgaatcagaacccgctgtttgccgatgtcgcgatttacaatcgcaaagtagcctatgcagaacaactgcccaaagttctggacgaagctattcgtacagcggtggcatatcgtggcgttgctgtggtggaagtaccggtcaatttcgggtgggagaagatcgatgccgataaatggccaagttcggcgtctagctaccgcaaactcccgaagatgcttcctgacgtgtccgatatcgataaagccgttgcactgctggagaaagctaaacgcccggtcatttatgccggcaaaggtacccgtggctgtggtgaattggtggaagcgttagggcgcaagattaaagcgcccgtcgcaatcaccggcatcaactttgacaactttaactacgattatgaaggtctgcttggatcagcgttccgtgttgcctggaaaccggctaatgaagcattagccgaggctgacacggtgctgtttgttggcagcaatttcccattttccgaagagaaaggtaccttcagcaacgtcaagcacttcattcagattgataacaaccagaagaatctggggaaacgccatcatccggatgtaactatcttgggcgacgccgaaattgcactgtcgaagatcaacgaacaaattgctgaagcacctctgacggagtggtaccaggccaatctggataacatcaagaactggaaagagtatatgcaccagctggaaaagaataccgaaggtgacctccgtctgtaccaagtgtatgatgccattaatcgctacgcagatgaaaacgccctgtatagtgtagatgtgggagacgtgacacagacctctatccgtcatctccacatgacgccgaagaatacttggcgcaccagcgaactctttgctacgatgggcaacggcttaccgggtgcaattgccgccaaactggagtttaagaatcgtcaagtttggtcactttcgggtgatggcgggttcgctatgaacatgcaggacattgtcaccgcagttcgctataatttgccatccatccatgtggtgtttagtaaccagcagtttggcttcattcgtgatagccaactggatacaaacgacgctatctttggtgtagatctgaccgacgtcgactttgccaagattgcagaagctcagggtgcagttggctacacgctgaaaaccatcgaagagatcgataatgtgttcagcaaagccattgaagatttgaatgcaggccgcgtcgtccttattgacgccaagatcatggatgaacgtccgattcccgttgagaacctgattctggataaagaactctattcggaaactgaaatcaacgacttcaaagctctgtacaatggagagaaccttgtgaccctgaaagaattgttgaatgct

SEQ ID NO: 40 - protein, 593 aa, synthetic construct
  REGION 1..593: note = Variant of pyruvate oxidase
MHHHHHHGGSGMSNKIDGWVAGLKTIESWGVENIYGIPAGSLNSLMDALEKEKENINFIQVRHEEAGALAASMHAKFTGKIGVCVGSAGPGATHLYNGLYDAKFDNVPVLAILGQRPLSEANMDMFQEMNQNPLFADVAIYNRKVAYAEQLPKVLDEAIRTAVAYRGVAVVEVPVNFGWEKIDADKWPSSASSYRKLPKMLPDVSDIDKAVALLEKAKRPVIYAGKGTRGCGELVEALGRKIKAPVAITGINFDNFNYDYEGLLGSAFRVAWKPANEALAEADTVLFVGSNFPFSEEKGTFSNVKHFIQIDNNQKNLGKRHHPDVTILGDAEIALSKINEQIAEAPLTEWYQANLDNIKNWKEYMHQLEKNTEGDLRLYQVYDAINRYADENALYSVDVGDVTQTSIRHLHMTPKNTWRTSELFATMGNGLPGAIAAKLEFKNRQVWSLSGDGGFAMNMQDIVTAVRYNLPSIHVVFSNQQFGFIRDSQLDTNDAIFGVDLTDVDFAKIAEAQGAVGYTLKTIEEIDNVFSKAIEDLNAGRVVLIDAKIMDERPIPVENLILDKELYSETEINDFKALYNGENLVTLKELLNA

SEQ ID NO: 41 - DNA, 1824 bp, synthetic construct
  misc_feature 1..1824: note = Variant of pyruvate oxidase
  source 1..1824: mol_type = other DNA
atgcaccatcatcatcatcatggcggtagcggcatggaagcgaagattaaaagtggcattgctgcagtgcgtgttctggaggagtggggtgtgaaacatatctatggaattccgggtgggagcatcaacacctttatggatgccttacttgccgaaaaagaccgcatcgattacattcaggtacgtcacgaagaagtcggcgccatggcagcatcgatgcatgcgaaattcacgggtcaccttggtgtttgctttggttctgctggtccaggcgggactcatctgctgaatggcctttatgatgctcgcgaagaccatatgccggtgctggccctcatcggtcaattcgccaccaccgggatgaacatggatgcgtttcaggaaatcaatgagaaccctatttacgcagatgtttccgtctataatcgtacagtgatgacggcggaacagttaccgcacgtaattgacgaagccattcgccaagcgtacgcgaaacgcggagtcgcagtggtgcagcttcccgttgatctgggttggaaggatattccggctcagccattctattcatcagccggcgcgcatcgtacctatcctaacccggtcatggacaaagcggatttagaggccgccgcaaatatcttgagcagcagcgagaagacgatcatctacgcgggcattggtactcgcaaaagtggtttagatctggtggctctgtcgcgtaaactcaaagcaccgattgcggttaccgccatcaactatgactcctttccacacgactacgaaggcctgcttggatctgcgaatcgcgtcgcaacaaaaccggctaacgaagcctttccgcaagcggatacggtactgttcgtgggcaacaactatcccttttccgaagttagcggtattttcgcgcatgtcaagaattttatccagattgacaataatgtagcaaacctggggaaacgtcacgctaacggcgtgaccattctggccgatgcaggtgatgccgttcgcgctttaactgccatggtggatgaacgtgaggaaaccgcatggtggcgcgccaacctgaagaatatcgaaaactggcgtgcttacacgaaattcctggaaaccaaaacaacaggagacctgcagctgtatcaagtgtttgccgccatcaatgcacatgctcaggaagatgcaatttttagtgttgacgtaggcgatgtgaccgaaacctcgattcgccacttgcatatgaacccgaaacaaatgtggcgtacgtctaatctgttcgccactatgggcatcgcacttcctggtgctatcaccgccaaactggattttccggaacgtcaggtttgggcactcatgggcgatggtgctttccagatggtcatgcaagacttagccacgcaggtgcagtatcaactgccaattttgaacgtcgtctttagcaacgcacagtacgggttcattaaagatgagcaggaagacaccaatactggctatctgggtgtggactttatggatgtagatcacgctaagattgcagaagccatgggagccaaagcttttaccttacgccgcatcgaagaggttgatgaagtgttctcgaaagccaacaatgcagttgctgaaggtcatacggtgctgattgacgccaagatcacccaagatcgtccgattcccgtagagcatctggttcttgacccagcactgcacagtcaggaagccatcacgaaatttcgtgctcgctacgaggcacagattcttgaacctctctcagtctttttagctgcagaagggatcgccaccatgcatcgtgaagcagcagaaggcggcttc

SEQ ID NO: 42 - protein, 608 aa, synthetic construct
  REGION 1..608: note = Variant of pyruvate oxidase
MHHHHHHGGSGMEAKIKSGIAAVRVLEEWGVKHIYGIPGGSINTFMDALLAEKDRIDYIQVRHEEVGAMAASMHAKFTGHLGVCFGSAGPGGTHLLNGLYDAREDHMPVLALIGQFATTGMNMDAFQEINENPIYADVSVYNRTVMTAEQLPHVIDEAIRQAYAKRGVAVVQLPVDLGWKDIPAQPFYSSAGAHRTYPNPVMDKADLEAAANILSSSEKTIIYAGIGTRKSGLDLVALSRKLKAPIAVTAINYDSFPHDYEGLLGSANRVATKPANEAFPQADTVLFVGNNYPFSEVSGIFAHVKNFIQIDNNVANLGKRHANGVTILADAGDAVRALTAMVDEREETAWWRANLKNIENWRAYTKFLETKTTGDLQLYQVFAAINAHAQEDAIFSVDVGDVTETSIRHLHMNPKQMWRTSNLFATMGIALPGAITAKLDFPERQVWALMGDGAFQMVMQDLATQVQYQLPILNVVFSNAQYGFIKDEQEDTNTGYLGVDFMDVDHAKIAEAMGAKAFTLRRIEEVDEVFSKANNAVAEGHTVLIDAKITQDRPIPVEHLVLDPALHSQEAITKFRARYEAQILEPLSVFLAAEGIATMHREAAEGGF

SEQ ID NO: 43 - DNA, 1791 bp, synthetic construct
  misc_feature 1..1791: note = Variant of pyruvate oxidase
  source 1..1791: mol_type = other DNA
atgcaccatcatcatcatcatggcggtagcggcatgctgaccgatactattgatggttgggtggcgggcctcaaagttctggaagaatgggggattcgtaacgcctatggtttaccggcaggaagcctgaatagtcttatggacgcgtttgagaaagaacagggcaacattaatttcgtccaagtacgccatgaagaagttggtgctttagcagccgcaatgagtgcaaagtttacgggcaagatcggtgtgtgcattgggtctgcaggtccaggagcgacccacctgttcaacgggctgtacgacgcgaaatatgataatgtgccgttgttggctatcgtaggtcagcgccctctgaaacagctgaacctcgatatgtttcaagagttcaatcagaacccgtactttgtcgatgtgagcgtttataaccgtcgtgtggcctaccccgaacagctgccgaaagtcttagacgaggcaattcgcacagcgtatgctaagaaaggagttgcggtggtggaagtcccagtagattttggttgggccaaaatcgacaagaaagatacgtattccgctgccaatgcataccgcgaacgtccgcttcttgatcctgacgagaaagacattaaagcggccgtgtcaatcttggaagaagcagagaaaccggtcatttatgcaggagttggtacccgtgggtgtggtgaagcggttgttgagctcagcaagaagattaaagcgcccatcgtgattaccgggatcaacttcgataactttgattacgatactgacgctttattaggttctgcctatcgcgtaggatggaaaccggcgaatgaagtcttggaagaagccgatacgatcctcttcattgggtcgaattttccgttcagtgaagcggagaacatgttcggtaacatcaagaaatttgtgcaaattgacattgatccgtttaaacttggaaaacgccatcatgctgacgtgtcaatcttgggtgatgccagcctcgcgattgacaagatcctttccgaagtctcggtgaagaccgataatgggtggtacgaagcaaacattgcgaacaataagaactggaaagagtatatgcaggccttggaagaacgtaatgagggtgagctccagttattccaagtttacaatgcgatcaacaaagtagcagcagaagatgccatttatagcattgatgttgggaacacaacacagaccagtattcgtcaccttcacatgaacccaaagaatatgtggcgcaccagccaattgtttgctacgatgggaaacgggttacctggtgctatcgcggcgaaagcagaacttccagaacgtcaggtgtggtctctctcaggtgatggtggttttactatggtattccaggacattgttacggccgtcaaatacaaattgccgtccatcaatgtggtgtttaccaatgaacgctttgcgttcatccgcgatgagcaagaagacaccaacgaccatttctatggagtcgatattgccgatatcgattttgcgaagattgctgaagcacaaggagctaaagggtatacggtgcgtaagattgatgagctcgacaaagtctttgcgcaggccatcgaagacgagaagaacggtcatgtggtagtaattgatgcgaagatctcgttagatcgcccgattcctgttgaacacctccagttggatgaccgtaaattcacctccgaacagatcaaagcctttaaagaacgctactacggtgagaaccttcttccgctccatcatttccttaaagaacagaaactc

SEQ ID NO: 44 - protein, 597 aa, synthetic construct
  REGION 1..597: note = Variant of pyruvate oxidase
MHHHHHHGGSGMLTDTIDGWVAGLKVLEEWGIRNAYGLPAGSLNSLMDAFEKEQGNINFVQVRHEEVGALAAAMSAKFTGKIGVCIGSAGPGATHLFNGLYDAKYDNVPLLAIVGQRPLKQLNLDMFQEFNQNPYFVDVSVYNRRVAYPEQLPKVLDEAIRTAYAKKGVAVVEVPVDFGWAKIDKKDTYSAANAYRERPLLDPDEKDIKAAVSILEEAEKPVIYAGVGTRGCGEAVVELSKKIKAPIVITGINFDNFDYDTDALLGSAYRVGWKPANEVLEEADTILFIGSNFPFSEAENMFGNIKKFVQIDIDPFKLGKRHHADVSILGDASLAIDKILSEVSVKTDNGWYEANIANNKNWKEYMQALEERNEGELQLFQVYNAINKVAAEDAIYSIDVGNTTQTSIRHLHMNPKNMWRTSQLFATMGNGLPGAIAAKAELPERQVWSLSGDGGFTMVFQDIVTAVKYKLPSINVVFTNERFAFIRDEQEDTNDHFYGVDIADIDFAKIAEAQGAKGYTVRKIDELDKVFAQAIEDEKNGHVVVIDAKISLDRPIPVEHLQLDDRKFTSEQIKAFKERYYGENLLPLHHFLKEQKL

SEQ ID NO: 45 - DNA, 1878 bp, synthetic construct
  misc_feature 1..1878: note = Variant of pyruvate oxidase
  source 1..1878: mol_type = other DNA
atgcaccatcatcatcatcatggcggtagcggcatggcgaaaaacgtgattcagtttggtttcgataccaaggttgccaatcgccatgaagtaggcacgatcaaagcaggagtggctgtcgtcaaactgctggaaagctggggcgtgaagcacatttatggtattccgggcggctcgatcaactccttaatggacgcgttgtacgaggagaaacaaaatatcgattatattcaggttcgtcatgaagaagttggtgccatggcagcggcgatgcacgccaagatgactggtgaaatcggcgtgtgctttggttcagctggaccaggtggcacccatctgatgaacggcctttacgatgcacgcgaagaccatgttccggtactcgctctggtgggtcagttcggcacagcgggcatgaattgggatacctttcaagagattaacgaaaaccctatcttcgcagacgtcgcgatctataatcgtacggtaatgaccgcggatcagttaccgcacgtggtggatgaagccattcgccaggcctacgccaagaatggagtcgcggtggttcagattcccgtaaacctgggttgggtcaacattgacactgatgcatggtatagtgctgctcatgctcatcgccgttatccgaatccaacgttagatcccgaggacattgccctggccgttaacatcctgaatgaagcagaacgccctgtgatctttgctggcattggtacccgcggcaaaagcaagatcgtcattgatctgtgtcgcaagattaaagcaccgcttgccaacacgggaatctcttgggacaactttccgagcgatttcgaggcactcctcggtagtccaaatcgtgtgtccaccaaaccctcggttgaagtgtttcctgaagccgatgtcgtcgttttcgtgggcaacaactacccgtttgctgaggtgtctaaaatcttcaagaacgtgaagaaatttatccaaattgacattgatccgagcaaactgggtaaacgtcattatacagatgttgccattttaggcgatgccggtgacgctctgaaagcaatctacgagaaagtcgacgagaaaccggataatggatggtggcgcgccaatctggacaacgtggtgaattggaacgaatatgttcaccgtctggaaaccaagactgaaggcgaacttcagttgtaccaagtctataatcagattaatcgcgtttcagagaaagatgcaatctactcgattgatgttggcgatgtgacccaaacgagcatccgtcatctgcacatgaatccacaacagatgtggcgtacttccgccctgttcgctaccatgggtattggcttaccgggtgcaatcgcagctaaattggactttcctggtcgccaggtctggaacttagctggagatggcggctttaacatggtgatgcaggatttggccacacaggttcagtataaactcccgattattaacgttgtcttcgccaaccaacaatacggcttcatcaaagacgaacaggaagacacgaacaaaggttttcttggagtgcagtttcaggataccgactataagaaattagccgaaagtatgggtgcagtgggctattctgtcaccaagatttcacagcttgaggatgtgtttgatgcagcaatccgcgacattgctaatggccgtgtggtggttatcgacgccaagattagcaatgaacgtccacttccggccgaattgttggaattagatccgcgcctttcctccgatgaagatatcgagcgcttcaaacaacgttacgaagctgaggatctcaaacctctcagctatttccttgagaaagagggtttggaatcgcatatcggcaagattgaacagggtggtttc

SEQ ID NO: 46 - protein, 626 aa, synthetic construct
  REGION 1..626: note = Variant of pyruvate oxidase
MHHHHHHGGSGMAKNVIQFGFDTKVANRHEVGTIKAGVAVVKLLESWGVKHIYGIPGGSINSLMDALYEEKQNIDYIQVRHEEVGAMAAAMHAKMTGEIGVCFGSAGPGGTHLMNGLYDAREDHVPVLALVGQFGTAGMNWDTFQEINENPIFADVAIYNRTVMTADQLPHVVDEAIRQAYAKNGVAVVQIPVNLGWVNIDTDAWYSAAHAHRRYPNPTLDPEDIALAVNILNEAERPVIFAGIGTRGKSKIVIDLCRKIKAPLANTGISWDNFPSDFEALLGSPNRVSTKPSVEVFPEADVVVFVGNNYPFAEVSKIFKNVKKFIQIDIDPSKLGKRHYTDVAILGDAGDALKAIYEKVDEKPDNGWWRANLDNVVNWNEYVHRLETKTEGELQLYQVYNQINRVSEKDAIYSIDVGDVTQTSIRHLHMNPQQMWRTSALFATMGIGLPGAIAAKLDFPGRQVWNLAGDGGFNMVMQDLATQVQYKLPIINVVFANQQYGFIKDEQEDTNKGFLGVQFQDTDYKKLAESMGAVGYSVTKISQLEDVFDAAIRDIANGRVVVIDAKISNERPLPAELLELDPRLSSDEDIERFKQRYEAEDLKPLSYFLEKEGLESHIGKIEQGGF

SEQ ID NO: 47 - DNA, 1818 bp, synthetic construct
  misc_feature 1..1818: note = Variant of pyruvate oxidase
  source 1..1818: mol_type = other DNA
atgcaccatcatcatcatcatggcggtagcggcatggcgaaaattgatgcatgggtggctggtctgcgtgtccttgaagactggggcatcaagagcgtttatggattaccggccggcagtctgaactccttgatggatgcgtttgagaaagaacaggggaagatcaatttcattcaagtacgccatgaagaaaccggtgcactggctgcgtcgatgagcgccaaatttacgggcaagattgcagcatgcatcggttcagctggtccaggcgcgactcacctctacaacgggctgtatgatgcgaaagaggacaatgtgccggttctggcgattattggtcagcgtcctgaagtgcagtctaacttcgatatgtttcaagagttcaatcagaacccgtactttgctgacgtagcggtctataatcgccgcgttgcatacgcggaacagttacccaaagtgctggatgaagcaatccgtaccgcgattgctcgcaaaggagtggcagcggtcgaagttccggtgagttttggctgggaggttttggaagaagatagctggtattcgtcggcgaaatcctaccgtgactatccactgatgacaccggatgtcaacgacatcgatcaagctgtgaaagtacttgaggcatcagaacgccctatcatttatgcgggcattggtacccgtggctctgggcaggaagtggtggagctgagcaagaagatcaaagctccggtcgttgtaacgggcattaacttcgacaatttcgattacgaatttgatgcgctcctgggtagtgcatatcgtgttgcgtggaaacccgctaacgaagcgttagaagaagcagataccgtgctgtttgcgggcagcaattttccgttcgcagaggttgaggggacgttcgaccatgtcaaacactttatccagatcgatattgatcaacagaaattgggtaaacgccatgacgctgatgtgtctattctgggagatgcgggcgaatccatccgccagattaccgagaagatcgcagagaagactgacaaaggttggtacaaagcgaacattgataacgcgaagaattggaaagactatctgcaaagcctcgaagaacgtgaaagtggcgaacttcagctgtttcaagtatatcacgctatcaatcaggtggcagatgaagatgctgtctactcgattgacgttggtaacacaacacagacctccattcgccatctgcatatgaccccaaagaatacttggcgtaccagcaacatcttcgcaacgatggggaacggcttaccgggtgcgattgcggcgaaattggaaatgcctgatcgccaagtgtggaatttagctggagatggtggctttagcatggcaatgcaggacattgttacggcggtcaaatatgatctgccgatgatcaacgtggtgttcaccaatgagcgttttggctttattcgcgacgaacaggaagatacgaacgacaatttctacggcatcgatatcgctgatgtcgacttcgcaatgattggtcaagcacagggtgcgtcgtcatataccgtaactgagatctctcagctgaaagatgtgttttcccaagctgttgcggacgagaaagatgggaaagtcgtcgtgatcgactgtaagattagtttggatcgtccgattccagtagaacacctggaactcgatccgaaactgcatgaagaagaagcgatcgcgaaatttaaagagcgctactacgcagaagatcttaaacctctgaccgcttatctggaagcagaaggcgttgagattcgtcagtatcagtggaaagatacgctc

SEQ ID NO: 48 - protein, 606 aa, synthetic construct
  REGION 1..606: note = Variant of pyruvate oxidase
MHHHHHHGGSGMAKIDAWVAGLRVLEDWGIKSVYGLPAGSLNSLMDAFEKEQGKINFIQVRHEETGALAASMSAKFTGKIAACIGSAGPGATHLYNGLYDAKEDNVPVLAIIGQRPEVQSNFDMFQEFNQNPYFADVAVYNRRVAYAEQLPKVLDEAIRTAIARKGVAAVEVPVSFGWEVLEEDSWYSSAKSYRDYPLMTPDVNDIDQAVKVLEASERPIIYAGIGTRGSGQEVVELSKKIKAPVVVTGINFDNFDYEFDALLGSAYRVAWKPANEALEEADTVLFAGSNFPFAEVEGTFDHVKHFIQIDIDQQKLGKRHDADVSILGDAGESIRQITEKIAEKTDKGWYKANIDNAKNWKDYLQSLEERESGELQLFQVYHAINQVADEDAVYSIDVGNTTQTSIRHLHMTPKNTWRTSNIFATMGNGLPGAIAAKLEMPDRQVWNLAGDGGFSMAMQDIVTAVKYDLPMINVVFTNERFGFIRDEQEDTNDNFYGIDIADVDFAMIGQAQGASSYTVTEISQLKDVFSQAVADEKDGKVVVIDCKISLDRPIPVEHLELDPKLHEEEAIAKFKERYYAEDLKPLTAYLEAEGVEIRQYQWKDTL

SEQ ID NO: 49 - DNA, 963 bp, synthetic construct
  misc_feature 1..963: note = Variant of adenosine kinase
  source 1..963: mol_type = other DNA
atgcaccatcatcaccatcacgggggctccggcatgagtgcactgatttgcggttctttagcgtatgataccatcatggtgtttccggaccagttcaagaaccatattctgcccgataaagttcacatcctcaatgtcagctttcttgtaccacgcatgcgtcgtgaatttggaggctgtgccggcaacattgcgtacaatctgcatctgttgggtggtgctccgatccctatgggaacggtgggccaagatttcggtccgtatcgcgagcacttcgaaactctgggcattgacttatcccgcgtcaagatcatcgatgatctgtttacaccgcaggccttcattaccaccgaccatgataacaaccagattacggcgtttcatccaggcgcaatgatgcgttcgtacgaaaatcacgttcgtgatgtgccgggtgttaccttgggcctcgtaggtcctgatggacgcgagggcatgatccaaaatgccgaagaatttgctgctggtggcattccgttcatttttgacccaggtcaggcaatgccgctgttcaacggccccgaactgcgcgagtttatcgaacaggcggactatgtggtggtcaacgattacgaaagcaatcttcttcaagaacgtactggctggaacgagcaggacattgtttcacgcgtgcaggcgtatatcaccacgcaaggtcctaaaggagccctggtacatacaccggagaagacctacgatattccgccggcacacgaacgtcgtgtcgttgatccaactggttgcggcgacgcgtttcgcgccggcctgatctatggtattcagcataattatgattggttgaccattggccgcatgggaaacttaatgggtgcgctgaaagtggaacaccctggcacgcaaaatcagcgtttcgattttgccgaattcaacgaccagttcaaacaacagtttggctacgcgctc

SEQ ID NO: 50 - protein, 321 aa, synthetic construct
  REGION 1..321: note = Variant of adenosine kinase
MHHHHHHGGSGMSALICGSLAYDTIMVFPDQFKNHILPDKVHILNVSFLVPRMRREFGGCAGNIAYNLHLLGGAPIPMGTVGQDFGPYREHFETLGIDLSRVKIIDDLFTPQAFITTDHDNNQITAFHPGAMMRSYENHVRDVPGVTLGLVGPDGREGMIQNAEEFAAGGIPFIFDPGQAMPLFNGPELREFIEQADYVVVNDYESNLLQERTGWNEQDIVSRVQAYITTQGPKGALVHTPEKTYDIPPAHERRVVDPTGCGDAFRAGLIYGIQHNYDWLTIGRMGNLMGALKVEHPGTQNQRFDFAEFNDQFKQQFGYAL

SEQ ID NO: 51 - DNA, 1017 bp, synthetic construct
  misc_feature 1..1017: note = Variant of adenosine kinase
  source 1..1017: mol_type = other DNA
atgcaccatcatcaccatcacgggggctccggcatgcgtattgcagttaccggtagcattgcgacggatcatctgatgacttttccgggacgcttcagtgaccagttagtggctgaacaactgaaccgcatctcgctctcctttctggtcgatgatttgcagatccgtcgtggcggcgtagccgccaatatttgcttcggtatggggagccttggtctgaacccaatcttagtgggagcggttggcgcagactttgcggattatcgctcttggttggagcgtcacggcgtggactgtgaatcaattcatgtctcggaacttcatcacaccgctcgcttcttgtgcacgacagatgaggagcacaatcagatcgcgagcttctacaccggtgccatggcagaagcgcgcgaaattgaattaggtcctgttgcccaacgtgtaggcggcctcgatctcgtgcttatcagtccgaacgatccggacgcgatgttacgccataccgaagaagctcgtcagcgtgggattccctttgcagccgatccgtcccaacagttggctcgcatggagagcgaacagattcgcgagcttatcgacggtgcggcgtatctctttacgaatgactacgagaaagccttggtcgaacagaagactggctggtctgatgaagaagtgttagatcgtgttcgcgtgcgtgtaaccacattaggtcctaaaggcgcacgcattgatcgtaaaggagaaccgtctctccatgttccaccagctccggaacgtggcaaagcagatccgaccggtgtcggtgacgcgtttcgcgcgggctttcttgcaggcgtggcgtgggggctctcgttggaacgctgtgctcaaatcggcaacttgattgcaacgcacgtgcttgagcgtgttgggtcacaggagtatgagttaagtcgcaccaccttcctcgaacgtttcactgcggcgtacggtgcggctgctgcagatgaagtagcgccgcatttgcgttgccctcaccct

SEQ ID NO: 52 - protein, 339 aa, synthetic construct
  REGION 1..339: note = Variant of adenosine kinase
MHHHHHHGGSGMRIAVTGSIATDHLMTFPGRFSDQLVAEQLNRISLSFLVDDLQIRRGGVAANICFGMGSLGLNPILVGAVGADFADYRSWLERHGVDCESIHVSELHHTARFLCTTDEEHNQIASFYTGAMAEAREIELGPVAQRVGGLDLVLISPNDPDAMLRHTEEARQRGIPFAADPSQQLARMESEQIRELIDGAAYLFTNDYEKALVEQKTGWSDEEVLDRVRVRVTTLGPKGARIDRKGEPSLHVPPAPERGKADPTGVGDAFRAGFLAGVAWGLSLERCAQIGNLIATHVLERVGSQEYELSRTTFLERFTAAYGAAAADEVAPHLRCPHP

SEQ ID NO: 53 - DNA, 1017 bp, synthetic construct
  misc_feature 1..1017: note = Variant of adenosine kinase
  source 1..1017: mol_type = other DNA
atgcaccatcatcaccatcacgggggctccggcatgcgtattgcagttaccggttctattgcgacggatcatctgatgacttttccgggccgcttcgtggaccagttagtccccgataaactgcaccgcgtaagcctgtcgtttttggttgatgggctcgaaatccgtcgtggtggaatcgccgccaacatttgcttcggcatggcttgtcttggcctggagccaatcttagtcggtgcggtgggccatgactttgacgattatcgcagttggctggatcgtcacggtgtgaatacccgcttcgtacatgtgtccgaactgcatcacacagcacgctttttgtgcacgaccgatctggaccacaaccaactggcgagcttctaccctggcgctatgtcagaagcccgtgatattgagttagcaccgatcgcggaacgtgtcggtgggctcgacctggtgatgatttcgccgaatgatccggaagcgatgcttcgccataccgatgaatgtcgcattcgtggctatccatttgccgctgatccgagccagcagctggcacgcttggacggagatgatgttcgtcgtctggttgagggtgcccgctacctgtttacgaacgaatatgaaggccaactcactgagcagaaaaccgggtggtcccatgaagaaatcttagaccgcgtggagattcgtgtcacaacattgggtcctcacggcgtacgcatcgatcgtaagggcgcggaaccgattgttgttccagcgccggaagaagaggtgaaagcagatcccaccggtgtcggagatgctttccgtgccgggtttctggcgggtgtagcgtggggcctgagtctggaacgctcagcccagatcggcaatatgttggcaacgctggcgcttgagaccattggtacgcaagaatacgaattaggacgcggccgtttcctggaacgcctggccaagacctatggtgaggaggctgctgcagacatcgaaccgcatgttcgttgcccttatcct

SEQ ID NO: 54 - protein, 339 aa, synthetic construct
  REGION 1..339: note = Variant of adenosine kinase
MHHHHHHGGSGMRIAVTGSIATDHLMTFPGRFVDQLVPDKLHRVSLSFLVDGLEIRRGGIAANICFGMACLGLEPILVGAVGHDFDDYRSWLDRHGVNTRFVHVSELHHTARFLCTTDLDHNQLASFYPGAMSEARDIELAPIAERVGGLDLVMISPNDPEAMLRHTDECRIRGYPFAADPSQQLARLDGDDVRRLVEGARYLFTNEYEGQLTEQKTGWSHEEILDRVEIRVTTLGPHGVRIDRKGAEPIVVPAPEEEVKADPTGVGDAFRAGFLAGVAWGLSLERSAQIGNMLATLALETIGTQEYELGRGRFLERLAKTYGEEAAADIEPHVRCPYP

SEQ ID NO: 55 - DNA, 633 bp, synthetic construct
  misc_feature 1..633: note = Variant of 3'O-kinase
  source 1..633: mol_type = other DNA
atggcgtttaccattggtttaacaggagggatcgcaagcggcaaatcgactgtgagtgccatgatgcgtgaactgggtctgccggtcatcgatgctgacgaggcagcacgcgccgttgttcgtccaggcgaagaagcttatcgccagattgtagctgcgttcggtccgggcattcttcgtgccgatggcgagatcgatcgcgccaaattgggtgccatcgtgtttaacgacgaacaacaacgtaaggtgctgaatgcgattgtacatcctgcagtccgcaagaagatgctcgctgagaaagaagctcatatccgctcaggcgccaagacggttgtgctggatatcccgctgctgttcgaatccggattgacccattgggtcgacaaagtgctcgtggtgtacgtcgatgatgatgttcagttacgccgccttatggcacgtaacgggtttaccgaagaagaagctctggcccgcattcgttcacagtggccctcggccgagaaagttaaacgtgcagacgctgtaatcgacaataatggcacgattgaagaaacccgccgccagctgctggccattttacaccagtgggatgcactgggtaagggtggctccggccaccatcatcaccatcac

SEQ ID NO: 56 - protein, 211 aa, synthetic construct
  REGION 1..211: note = Variant of 3'O-kinase
MAFTIGLTGGIASGKSTVSAMMRELGLPVIDADEAARAVVRPGEEAYRQIVAAFGPGILRADGEIDRAKLGAIVFNDEQQRKVLNAIVHPAVRKKMLAEKEAHIRSGAKTVVLDIPLLFESGLTHWVDKVLVVYVDDDVQLRRLMARNGFTEEEALARIRSQWPSAEKVKRADAVIDNNGTIEETRRQLLAILHQWDALGKGGSGHHHHHH

SEQ ID NO: 57 - DNA, 633 bp, synthetic construct
  misc_feature 1..633: note = Variant of 3'O-kinase
  source 1..633: mol_type = other DNA
atggcgtttaccattggtttaacaggagggatcgcagtgggcaaatcgactgtgagtgccatgatgcgtgaactgggtctgccggtcatcgatgctgacgaggcagcacgcgccgttgttcgtccaggcgaagaagcttatcgccagattgtagctgcgttcggtccgggcattcttcgtgccgatggcgagatcgatcgcgccaaattgggtgccatcgtgtttaacgacgaacaacaacgtaaggtgctgaatgcgattgtacatcctgcagtccgcaagaagatgctcgctgagaaagaagctcatatccgctcaggcgccaagacggttgtgctggatatcccgctgctgttcgaatccggattgacccattgggtcgacaaagtgctcgtggtgtacgtcgatgatgatgttcagttacgccgccttatggcacgtaacgggtttaccgaagaagaagctctggcccgcattcgttcacagtggcccatggccgagaaagttaaacgtgcagacgctgtaatcgacaataatggcacgattgaagaaacccgccgccagctgctggccattttacaccagtgggatgcactgggtaagggtggctccggccaccatcatcaccatcac

SEQ ID NO: 58 - protein, 211 aa, synthetic construct
  REGION 1..211: note = Variant of 3'O-kinase
MAFTIGLTGGIAVGKSTVSAMMRELGLPVIDADEAARAVVRPGEEAYRQIVAAFGPGILRADGEIDRAKLGAIVFNDEQQRKVLNAIVHPAVRKKMLAEKEAHIRSGAKTVVLDIPLLFESGLTHWVDKVLVVYVDDDVQLRRLMARNGFTEEEALARIRSQWPMAEKVKRADAVIDNNGTIEETRRQLLAILHQWDALGKGGSGHHHHHH

SEQ ID NO: 59 - DNA, 633 bp, synthetic construct
  misc_feature 1..633: note = Variant of 3'O-kinase
  source 1..633: mol_type = other DNA
atggcgtttaccattggtttaacaggagggatcgcaagcggcaaatcgactgtgagtgccatgatgcgtgaactgggtctgccggtcatcgatgctgacgaggcagcacgcgccgttgttcgtccaggcgaagaagcttatcgccagattgtagctgcgttcggtccgggcattcttcgtgccgatggcgagatcgatcgcgccaaattgggtgccatcgtgtttaacgacgaacaacaacgtaaggtgctgaatgcgattgtacatcctgcagtctataagaagatgctcgctgagaaagaagctcatatccgctcaggcgccaagacggttgtgctggatatcccgctgctgttcgaatccggattgacccattgggtcgacaaagtgctcgtggtgtacgtcgatgatgatgttcagttacgccgccttatggcacgtaacgggtttaccgaagaagaagctctggcccgcattcgttcacagtggcccatggccgagaaagttaaacgtgcagacgctgtaatcgacaataatggcacgattgaagaaacccgccgccagctgctggccattttacaccagtgggatgcactgggtaagggtggctccggccaccatcatcaccatcac

SEQ ID NO: 60 - protein, 211 aa, synthetic construct
  REGION 1..211: note = Variant of 3'O-kinase
MAFTIGLTGGIASGKSTVSAMMRELGLPVIDADEAARAVVRPGEEAYRQIVAAFGPGILRADGEIDRAKLGAIVFNDEQQRKVLNAIVHPAVYKKMLAEKEAHIRSGAKTVVLDIPLLFESGLTHWVDKVLVVYVDDDVQLRRLMARNGFTEEEALARIRSQWPMAEKVKRADAVIDNNGTIEETRRQLLAILHQWDALGKGGSGHHHHHH

SEQ ID NO: 61 - DNA, 633 bp, synthetic construct
  misc_feature 1..633: note = Variant of 3'O-kinase
  source 1..633: mol_type = other DNA
atggcgtttaccattggtttaacaggagggatcgcaagcggcaaatcgactgtgagtgccatgatgcgtgaactgggtctgccggtcatcgatgctgacgaggcagcacgcgccgttgttcgtccaggcgaagaagcttatcgccagattgtagctgcgttcggtccgggcattcttcgtgccgatggcgagatcgatcgcgccaaattgggtgccatcaagtttaacgacgaacaacaacgtaaggtgctgaatgcgattgtacatcctgcagtccgcaagaagatgctcgctgagaaagaagctcatatccgctcaggcgccaagacggttgtgctggatatcccgctgctgttcgaatccggattgacccattgggtcgacaaagtgctcgtggtgtacgtcgatgatgatgttcagttacgccgccttatggcacgtaacgggtttaccgaagaagaagctctggcccgcattcgttcacagtggcccatggccgagaaagttaaacgtgcagacgctgtaatcgacaataatggcacgattgaagaaacccgccgccagctgctggccattttacaccagtgggatgcactgggtaagggtggctccggccaccatcatcaccatcac

SEQ ID NO: 62 - protein, 211 aa, synthetic construct
  REGION 1..211: note = Variant of 3'O-kinase
MAFTIGLTGGIASGKSTVSAMMRELGLPVIDADEAARAVVRPGEEAYRQIVAAFGPGILRADGEIDRAKLGAIKFNDEQQRKVLNAIVHPAVRKKMLAEKEAHIRSGAKTVVLDIPLLFESGLTHWVDKVLVVYVDDDVQLRRLMARNGFTEEEALARIRSQWPMAEKVKRADAVIDNNGTIEETRRQLLAILHQWDALGKGGSGHHHHHH

SEQ ID NO: 63 - DNA, 633 bp, synthetic construct
  misc_feature 1..633: note = Variant of 3'O-kinase
  source 1..633: mol_type = other DNA
atggcgtttaccattggtttaacaggagggatcgcaagcggcaaatcgactgtgagtgccatgatgcgtgaactgggtctgccggtcatcgatgctgacgaggcagcacgcgaggttgttcgtccaggcgaagaagcttatcgccagattgtagctgcgttcggtccgggcattcttcgtgccgatggcgagatcgatcgcgccaaattgggtgccatcgtgtttaacgacgaacaacaacgtaaggtgctgaatgcgattgtacatcctgcagtccgcaagaagatgctcgctgagaaagaagctcatatccgctcaggcgccaagacggttgtgctggatatcccgctgctgttcgaatccggattgacccattgggtcgacaaagtgctcgtggtgtacgtcgatgatgatgttcagttacgccgccttatggcacgtaacgggtttaccgaagaagaagctctggcccgcattcgttcacagtggcccatggccgagaaagttaaacgtgcagacgctgtaatcgacaataatggcacgattgaagaaacccgccgccagctgctggccattttacaccagtgggatgcactgggtaagggtggctccggccaccatcatcaccatcac

SEQ ID NO: 64 - protein, 211 aa, synthetic construct
  REGION 1..211: note = Variant of 3'O-kinase
MAFTIGLTGGIASGKSTVSAMMRELGLPVIDADEAAREVVRPGEEAYRQIVAAFGPGILRADGEIDRAKLGAIVFNDEQQRKVLNAIVHPAVRKKMLAEKEAHIRSGAKTVVLDIPLLFESGLTHWVDKVLVVYVDDDVQLRRLMARNGFTEEEALARIRSQWPMAEKVKRADAVIDNNGTIEETRRQLLAILHQWDALGKGGSGHHHHHH

SEQ ID NO: 65 - DNA, 633 bp, synthetic construct
  misc_feature 1..633: note = Variant of 3'O-kinase
  source 1..633: mol_type = other DNA
atggcgtttaccattggtttaacaggagggatcgcaagcggcaaatcgactgtgagtgccatgatgcgtgaactgggtctgccggtcatcgatgctgacgaggcagcacgcgccctggttcgtccaggcgaagaagcttatcgccagattgtagctgcgttcggtccgggcattcttcgtgccgatggcgagatcgatcgcgccaaattgggtgccatcgtgtttaacgacgaacaacaacgtaaggtgctgaatgcgattgtacatcctgcagtccgcaagaagatgctcgctgagaaagaagctcatatccgctcaggcgccaagacggttgtgctggatatcccgctgctgttcgaatccggattgacccattgggtcgacaaagtgctcgtggtgtacgtcgatgatgatgttcagttacgccgccttatggcacgtaacgggtttaccgaagaagaagctctggcccgcattcgttcacagtggcccatggccgagaaagttaaacgtgcagacgctgtaatcgacaataatggcacgattgaagaaacccgccgccagctgctggccattttacaccagtgggatgcactgggtaagggtggctccggccaccatcatcaccatcac

SEQ ID NO: 66 - protein, 211 aa, synthetic construct
  REGION 1..211: note = Variant of 3'O-kinase
MAFTIGLTGGIASGKSTVSAMMRELGLPVIDADEAARALVRPGEEAYRQIVAAFGPGILRADGEIDRAKLGAIVFNDEQQRKVLNAIVHPAVRKKMLAEKEAHIRSGAKTVVLDIPLLFESGLTHWVDKVLVVYVDDDVQLRRLMARNGFTEEEALARIRSQWPMAEKVKRADAVIDNNGTIEETRRQLLAILHQWDALGKGGSGHHHHHH

SEQ ID NO: 67 - DNA, 633 bp, synthetic construct
  misc_feature 1..633: note = Variant of 3'O-kinase
  source 1..633: mol_type = other DNA
atggcgtttaccattggtttaacaggagggatcgcagcgggcaaatcgactgtgagtgccatgatgcgtgaactgggtctgccggtcatcgatgctgacgaggcagcacgcgccgttgttcgtccaggcgaagaagcttatcgccagattgtagctgcgttcggtccgggcattcttcgtgccgatggcgagatcgatcgcgccaaattgggtgccatcgtgtttaacgacgaacaacaacgtaaggtgctgaatgcgattgtacatcctgcagtccgcaagaagatgctcgctgagaaagaagctcatatccgctcaggcgccaagacggttgtgctggatatcccgctgctgttcgaatccggattgacccattgggtcgacaaagtgctcgtggtgtacgtcgatgatgatgttcagttacgccgccttatggcacgtaacgggtttaccgaagaagaagctctggcccgcattcgttcacagtggcccatggccgagaaagttaaacgtgcagacgctgtaatcgacaataatggcacgattgaagaaacccgccgccagctgctggccattttacaccagtgggatgcactgggtaagggtggctccggccaccatcatcaccatcac

SEQ ID NO: 68 - protein, 211 aa, synthetic construct
  REGION 1..211: note = Variant of 3'O-kinase
MAFTIGLTGGIAAGKSTVSAMMRELGLPVIDADEAARAVVRPGEEAYRQIVAAFGPGILRADGEIDRAKLGAIVFNDEQQRKVLNAIVHPAVRKKMLAEKEAHIRSGAKTVVLDIPLLFESGLTHWVDKVLVVYVDDDVQLRRLMARNGFTEEEALARIRSQWPMAEKVKRADAVIDNNGTIEETRRQLLAILHQWDALGKGGSGHHHHHH

SEQ ID NO: 69 - DNA, 633 bp, synthetic construct
  misc_feature 1..633: note = Variant of 3'O-kinase
  source 1..633: mol_type = other DNA
atggcgtttaccattggtttaacaggagggatcgcaagcggcaaatcgactgtgagtgccatgatgcgtgaactgggtctgccggtcatcgatgctgacgaggcagcacgcgccgttgttcgtccaggcgaagaagcttatcgccagattgtagctgcgttcggtccgggcattcttcgtgccgatggcgagatcgatcgcgccaaattgggtgccatcgtgtttaacgacgaacaacaacgtaaggtgctgaatgcgattgtattgcctgcagtccgcaagaagatgctcgctgagaaagaagctcatatccgctcaggcgccaagacggttgtgctggatatcccgctgctgttcgaatccggattgacccattgggtcgacaaagtgctcgtggtgtacgtcgatgatgatgttcagttacgccgccttatggcacgtaacgggtttaccgaagaagaagctctggcccgcattcgttcacagtggcccatggccgagaaagttaaacgtgcagacgctgtaatcgacaataatggcacgattgaagaaacccgccgccagctgctggccattttacaccagtgggatgcactgggtaagggtggctccggccaccatcatcaccatcac

SEQ ID NO: 70 - protein, 211 aa, synthetic construct
  REGION 1..211: note = Variant of 3'O-kinase
MAFTIGLTGGIASGKSTVSAMMRELGLPVIDADEAARAVVRPGEEAYRQIVAAFGPGILRADGEIDRAKLGAIVFNDEQQRKVLNAIVLPAVRKKMLAEKEAHIRSGAKTVVLDIPLLFESGLTHWVDKVLVVYVDDDVQLRRLMARNGFTEEEALARIRSQWPMAEKVKRADAVIDNNGTIEETRRQLLAILHQWDALGKGGSGHHHHHH

SEQ ID NO: 71 - DNA, 633 bp, synthetic construct
  misc_feature 1..633: note = Variant of 3'O-kinase
  source 1..633: mol_type = other DNA
atggcgtttaccattggtttaacaggagggatcgcaagcggcaaatcgactgtgagtgccatgatgcgtgaactgggtctgccggtcatcgatgctgacgaggcagcacgcgccgttgttcgtccaggcgaagaagcttatcgccagattgtagctgcgttcggtccgggcattcttcgtgccgatggcgagatcgatcgcgccaaattgggtgccatcgtgtttaacgacgaacaacaacgtaaggtgctgaatgcgattgtacatcctgcagtccgcaagaagatgctcgctgagaaagaagctcatatccgctcaggcgccaagacggttgtgctggatatcccgctgctgttcgaatccggattgtggcattgggtcgacaaagtgctcgtggtgtacgtcgatgatgatgttcagttacgccgccttatggcacgtaacgggtttaccgaagaagaagctctggcccgcattcgttcacagtggcccatggccgagaaagttaaacgtgcagacgctgtaatcgacaataatggcacgattgaagaaacccgccgccagctgctggccattttacaccagtgggatgcactgggtaagggtggctccggccaccatcatcaccatcac

SEQ ID NO: 72 - protein, 211 aa, synthetic construct
  REGION 1..211: note = Variant of 3'O-kinase
MAFTIGLTGGIASGKSTVSAMMRELGLPVIDADEAARAVVRPGEEAYRQIVAAFGPGILRADGEIDRAKLGAIVFNDEQQRKVLNAIVHPAVRKKMLAEKEAHIRSGAKTVVLDIPLLFESGLWHWVDKVLVVYVDDDVQLRRLMARNGFTEEEALARIRSQWPMAEKVKRADAVIDNNGTIEETRRQLLAILHQWDALGKGGSGHHHHHH

SEQ ID NO: 73 - DNA, 633 bp, synthetic construct
  misc_feature 1..633: note = Variant of 3'O-kinase
  source 1..633: mol_type = other DNA
atggcgtttaccattggtttaacaggagggatcgcaagcggcaaatcgactgtgagtgccatgatgcgtgaactgggtctgccggtcatcgatgctgacgaggcagcacgcgccgttgttcgtccaggcgaagaagcttatcgccagattgtagctgcgttcggtccgggcattcttcgtgccgatggcgagatcgatcgcgccaaattgggtcgtatcgtgtttaacgacgaacaacaacgtaaggtgctgaatgcgattgtacatcctgcagtccgcaagaagatgctcgctgagaaagaagctcatatccgctcaggcgccaagacggttgtgctggatatcccgctgctgttcgaatccggattgacccattgggtcgacaaagtgctcgtggtgtacgtcgatgatgatgttcagttacgccgccttatggcacgtaacgggtttaccgaagaagaagctctggcccgcattcgttcacagtggcccatggccgagaaagttaaacgtgcagacgctgtaatcgacaataatggcacgattgaagaaacccgccgccagctgctggccattttacaccagtgggatgcactgggtaagggtggctccggccaccatcatcaccatcac

SEQ ID NO: 74 - protein, 211 aa, synthetic construct
  REGION 1..211: note = Variant of 3'O-kinase
MAFTIGLTGGIASGKSTVSAMMRELGLPVIDADEAARAVVRPGEEAYRQIVAAFGPGILRADGEIDRAKLGRIVFNDEQQRKVLNAIVHPAVRKKMLAEKEAHIRSGAKTVVLDIPLLFESGLTHWVDKVLVVYVDDDVQLRRLMARNGFTEEEALARIRSQWPMAEKVKRADAVIDNNGTIEETRRQLLAILHQWDALGKGGSGHHHHHH

SEQ ID NO: 75 - DNA, 633 bp, synthetic construct
  misc_feature 1..633: note = Variant of 3'O-kinase
  source 1..633: mol_type = other DNA
atggcgtttaccattggtttaacaggagggatcgcaagcggcaaatcgactgtgagtgccatgatgcgtgaactgggtctgccggtcatcgatgctgacgaggcagcacgcgccgttgttcgtccaggcgaagaagcttatcgccagattgtagctgcgttcggtccgggcattcttcgtgccgatggcgagatcgatcgcgccaaattgggtgccatcgtgtttaacgacgaacaacaacgtaaggtgctgaatgcgattgtacatcctgcagtccgcaagaagatgctcgctgagaaagaagctcatatccgctcaggcgccaagacggttgtgctggatatcccgctgctgttcgaatccggattggtgcattgggtcgacaaagtgctcgtggtgtacgtcgatgatgatgttcagttacgccgccttatggcacgtaacgggtttaccgaagaagaagctctggcccgcattcgttcacagtggcccatggccgagaaagttaaacgtgcagacgctgtaatcgacaataatggcacgattgaagaaacccgccgccagctgctggccattttacaccagtgggatgcactgggtaagggtggctccggccaccatcatcaccatcac

SEQ ID NO: 76 - protein, 211 aa, synthetic construct
  REGION 1..211: note = Variant of 3'O-kinase
MAFTIGLTGGIASGKSTVSAMMRELGLPVIDADEAARAVVRPGEEAYRQIVAAFGPGILRADGEIDRAKLGAIVFNDEQQRKVLNAIVHPAVRKKMLAEKEAHIRSGAKTVVLDIPLLFESGLVHWVDKVLVVYVDDDVQLRRLMARNGFTEEEALARIRSQWPMAEKVKRADAVIDNNGTIEETRRQLLAILHQWDALGKGGSGHHHHHH

SEQ ID NO: 77 - DNA, 633 bp, synthetic construct
  misc_feature 1..633: note = Variant of 3'O-kinase
  source 1..633: mol_type = other DNA
atggcgtttaccattggtttaacaggagggatcgcaagcggcaaatcgactgtgagtgccatgatgcgtgaactgggtctgccggtcatcgatgctgacgaggcagcacgcgccgttgttcgtccaggcgaagaagcttatcgccagattgtagctgcgttcggtccgggcattcttcgtgccgatggcgagatcgatcgcgccaaattgggtgccatcgtgtttaacgacgaacaacaacgtaaggtgctgaatgcgattgtacatcctgcagtccgcaagaagatgctcgctgagaaagaagctcatatccgctcaggcgccaagacggttgtgctggatatcccgctgctgttcgaatccggattgacccattgggtcgacaaagtgctcgtggtgtacgtcgatgatgatgttcagttacgccgccttatggcacgtaacgggtttaccgaagaagaagctctggcccgcattcgttcacagtggcccatggccgagaaagttaaacgtgcagacgctgtaatcgaccataatggcacgattgaagaaacccgccgccagctgctggccattttacaccagtgggatgcactgggtaagggtggctccggccaccatcatcaccatcac

SEQ ID NO: 78 - protein, 211 aa, synthetic construct
  REGION 1..211: note = Variant of 3'O-kinase
MAFTIGLTGGIASGKSTVSAMMRELGLPVIDADEAARAVVRPGEEAYRQIVAAFGPGILRADGEIDRAKLGAIVFNDEQQRKVLNAIVHPAVRKKMLAEKEAHIRSGAKTVVLDIPLLFESGLTHWVDKVLVVYVDDDVQLRRLMARNGFTEEEALARIRSQWPMAEKVKRADAVIDHNGTIEETRRQLLAILHQWDALGKGGSGHHHHHH

SEQ ID NO: 79 - DNA, 627 bp, synthetic construct
  misc_feature 1..627: note = Variant of 3'O-kinase
  source 1..627: mol_type = other DNA
atggcgtttaccattggtttaacaggagggatcgcaagcggcaaatcgactgtgagtgccatgatgcgtgaactgggtctgccggtcatcgatgctgacgaggcagcacgcgccgttgttcgtccaggcgaagaagcttatcgccagattgtagctgcgttcggtccgggcattcttcgtgccgatggcgagatcgatcgcgccaaattgggtgccatcgtgtttaacgacgaacaacaacgtaaggtgctgaatgcgattgtacatcctgcagtccgcaagaagatgctcgctgagaaagaagctcatatccgctcaggcgccaagacggttgtgctggatatcccgctgctgttcgaatccggattgacccattgggtcgacaaagtgctcgtggtgtacgtcgatgatcagttacgccgccttatggcacgtaacgggtttaccgaagaagaagctctggcccgcattcgttcacagtggcccatggccgagaaagttaaacgtgcagacgctgtaatcgacaataatggcacgattgaagaaacccgccgccagctgctggccattttacaccagtgggatgcactgggtaagggtggctccggccaccatcatcaccatcac

SEQ ID NO: 80 - protein, 209 aa, synthetic construct
  REGION 1..209: note = Variant of 3'O-kinase
MAFTIGLTGGIASGKSTVSAMMRELGLPVIDADEAARAVVRPGEEAYRQIVAAFGPGILRADGEIDRAKLGAIVFNDEQQRKVLNAIVHPAVRKKMLAEKEAHIRSGAKTVVLDIPLLFESGLTHWVDKVLVVYVDDQLRRLMARNGFTEEEALARIRSQWPMAEKVKRADAVIDNNGTIEETRRQLLAILHQWDALGKGGSGHHHHHH

SEQ ID NO: 81 - DNA, 633 bp, synthetic construct
  misc_feature 1..633: note = Variant of 3'O-kinase
  source 1..633: mol_type = other DNA
atggcgtttaccattggtttaacaggagggatcgcaagcggcaaatcgcgggtgagtgccatgatgcgtgaactgggtctgccggtcatcgatgctgacgaggcagcacgcgccgttgttcgtccaggcgaagaagcttatcgccagattgtagctgcgttcggtccgggcattcttcgtgccgatggcgagatcgatcgcgccaaattgggtgccatcgtgtttaacgacgaacaacaacgtaaggtgctgaatgcgattgtacatcctgcagtccgcaagaagatgctcgctgagaaagaagctcatatccgctcaggcgccaagacggttgtgctggatatcccgctgctgttcgaatccggattgacccattgggtcgacaaagtgctcgtggtgtacgtcgatgatgatgttcagttacgccgccttatggcacgtaacgggtttaccgaagaagaagctctggcccgcattcgttcacagtggcccatggccgagaaagttaaacgtgcagacgctgtaatcgacaataatggcacgattgaagaaacccgccgccagctgctggccattttacaccagtgggatgcactgggtaagggtggctccggccaccatcatcaccatcac

SEQ ID NO: 82 - protein, 211 aa, synthetic construct
  REGION 1..211: note = Variant of 3'O-kinase
MAFTIGLTGGIASGKSRVSAMMRELGLPVIDADEAARAVVRPGEEAYRQIVAAFGPGILRADGEIDRAKLGAIVFNDEQQRKVLNAIVHPAVRKKMLAEKEAHIRSGAKTVVLDIPLLFESGLTHWVDKVLVVYVDDDVQLRRLMARNGFTEEEALARIRSQWPMAEKVKRADAVIDNNGTIEETRRQLLAILHQWDALGKGGSGHHHHHH

SEQ ID NO: 83 - DNA, 633 bp, synthetic construct
  misc_feature 1..633: note = Variant of 3'O-kinase
  source 1..633: mol_type = other DNA
atggcgtttaccattggtttaacaggagggatcgcaagcggcaaatcgactgtgagtgccatgatgcgtgaactgggtctgccggtcatcgatgctgacgaggcagcacgcgccgttgttcgtccaggcgaagaagcttatcgccagattgtagctgcgttcggtccgggcattcttcgtgccgatggcgagatcgatcgcgccaaattgggtgccatcgtgtttaacgacgaacaacaacgtaaggtgctgaatgcgattgtacatcctgcagtccgcaagaagatgctcgctgagaaagaagctcatatccgctcaggcgccaagacggttgtgctggatatcccgctgctgttcgaatccggattgacccattgggtcgacaaagtgctcgtggtgtacgtcgatgatgatgttcagttacgccgccttatggcacgtagggggtttaccgaagaagaagctctggcccgcattcgttcacagtggcccatggccgagaaagttaaacgtgcagacgctgtaatcgacaataatggcacgattgaagaaacccgccgccagctgctggccattttacaccagtgggatgcactgggtaagggtggctccggccaccatcatcaccatcac

SEQ ID NO: 84 - protein, 211 aa, synthetic construct
  REGION 1..211: note = Variant of 3'O-kinase
MAFTIGLTGGIASGKSTVSAMMRELGLPVIDADEAARAVVRPGEEAYRQIVAAFGPGILRADGEIDRAKLGAIVFNDEQQRKVLNAIVHPAVRKKMLAEKEAHIRSGAKTVVLDIPLLFESGLTHWVDKVLVVYVDDDVQLRRLMARRGFTEEEALARIRSQWPMAEKVKRADAVIDNNGTIEETRRQLLAILHQWDALGKGGSGHHHHHH

SEQ ID NO: 85 - DNA, 633 bp, synthetic construct
  misc_feature 1..633: note = Variant of 3'O-kinase
  source 1..633: mol_type = other DNA
atggcgtttaccattggtttaacaggagggatcgcaagcggcaaatcgactgtgagtgccatgatgcgtgaactgggtctgccggtcatcgatgctgacgaggcagcacgcgccgttgttcgtccaggcgaagaagcttatcgccagattgtagctgcgttcggtccgggcattcttcgtgccgatggcgagatcgatcgcgccaaattgggtgccatcgtgtttaacgacgaacaacaacgtaaggtgctgaatgcgattgtacatcctgcagtccgcaagaagatgctcgctgagaaagaagctcatatccgctcaggcgccaagacggttgtgctggatatcccgctgctgttcgaatccggagctacccattgggtcgacaaagtgctcgtggtgtacgtcgatgatgatgttcagttacgccgccttatggcacgtaacgggtttaccgaagaagaagctctggcccgcattcgttcacagtggcccatggccgagaaagttaaacgtgcagacgctgtaatcgacaataatggcacgattgaagaaacccgccgccagctgctggccattttacaccagtgggatgcactgggtaagggtggctccggccaccatcatcaccatcac

SEQ ID NO: 86 - protein, 211 aa, synthetic construct
  REGION 1..211: note = Variant of 3'O-kinase
MAFTIGLTGGIASGKSTVSAMMRELGLPVIDADEAARAVVRPGEEAYRQIVAAFGPGILRADGEIDRAKLGAIVFNDEQQRKVLNAIVHPAVRKKMLAEKEAHIRSGAKTVVLDIPLLFESGATHWVDKVLVVYVDDDVQLRRLMARNGFTEEEALARIRSQWPMAEKVKRADAVIDNNGTIEETRRQLLAILHQWDALGKGGSGHHHHHH

SEQ ID NO: 87 - DNA, 633 bp, synthetic construct
  misc_feature 1..633: note = Variant of 3'O-kinase
  source 1..633: mol_type = other DNA
atggcgtttaccattggtttaacaggagggatcgcaagcggcaaatcgactgtgagtgccatgatgcgtgaactgggtctgccggtcatcgatgctgacgaggcagcacgcgccgttgttcgtccaggcgaagaagcttatcgccagattgtagctgcgttcggtccgggcattcttcgtgccgatggcgagatcgatcgcgccaaattgggtgccatcgtgtttaacgacgaacaacaacgtaaggtgctgaatgcgattgtacatcctgcagtccgcaagaagatgctcgctgagaaagaagctcatatccgctcaggcgccaagacggttgtgctggatatcccgctgctgttcgaatccggattgacccattgggtcgacaaagtgctcgtggtgtacgtcgatgatgatgttcagttacgccgccttatggcacgtaacgggtttaccgaagaagaagctctggcccgcattcgttcacagtggcccatggccgagaaagttaaacgtgcagacgctgtaatctcgaataatggcacgattgaagaaacccgccgccagctgctggccattttacaccagtgggatgcactgggtaagggtggctccggccaccatcatcaccatcac

SEQ ID NO: 88 - protein, 211 aa, synthetic construct
  REGION 1..211: note = Variant of 3'O-kinase
MAFTIGLTGGIASGKSTVSAMMRELGLPVIDADEAARAVVRPGEEAYRQIVAAFGPGILRADGEIDRAKLGAIVFNDEQQRKVLNAIVHPAVRKKMLAEKEAHIRSGAKTVVLDIPLLFESGLTHWVDKVLVVYVDDDVQLRRLMARNGFTEEEALARIRSQWPMAEKVKRADAVISNNGTIEETRRQLLAILHQWDALGKGGSGHHHHHH

SEQ ID NO: 89 - DNA, 633 bp, synthetic construct
  misc_feature 1..633: note = Variant of 3'O-kinase
  source 1..633: mol_type = other DNA
atggcgtttaccattggtttaacaggagggatcgcaagcggcaaatcgactgtgagtgccatgatgcgtgaactgggtctgccggtcatcgatgctgacgaggcagcacgcgccgttgttcgtccaggcgaagaagcttatcgccagattgtagctgcgttcggtccgggcattcttcgtgccgatggcgagatcgatcgcgccaaattgggtgccatcgtgtttaacgacgaacaacaacgtaaggtgctgaatgcgattgtacatcctgcagtccgcaagaagatgctcgctgagaaagaagctcatatccgctcaggcgccaagacggttgtgctggatatcccgctgctgttcgaatccggaattacccattgggtcgacaaagtgctcgtggtgtacgtcgatgatgatgttcagttacgccgccttatggcacgtaacgggtttaccgaagaagaagctctggcccgcattcgttcacagtggcccatggccgagaaagttaaacgtgcagacgctgtaatcgacaataatggcacgattgaagaaacccgccgccagctgctggccattttacaccagtgggatgcactgggtaagggtggctccggccaccatcatcaccatcac

SEQ ID NO: 90 - protein, 211 aa, synthetic construct
  REGION 1..211: note = Variant of 3'O-kinase
MAFTIGLTGGIASGKSTVSAMMRELGLPVIDADEAARAVVRPGEEAYRQIVAAFGPGILRADGEIDRAKLGAIVFNDEQQRKVLNAIVHPAVRKKMLAEKEAHIRSGAKTVVLDIPLLFESGITHWVDKVLVVYVDDDVQLRRLMARNGFTEEEALARIRSQWPMAEKVKRADAVIDNNGTIEETRRQLLAILHQWDALGKGGSGHHHHHH

SEQ ID NO: 91 - DNA, 633 bp, synthetic construct
  misc_feature 1..633: note = Variant of 3'O-kinase
  source 1..633: mol_type = other DNA
atggcgtttaccattggtttaacaggagggatcgcaagcggcaaatcgactgtgagtgccatgatgcgtgaactgggtctgccggtcatcgatgctgacgaggcagcacgcgccgttgttatgccaggcgaagaagcttatcgccagattgtagctgcgttcggtccgggcattcttcgtgccgatggcgagatcgatcgcgccaaattgggtgccatcgtgtttaacgacgaacaacaacgtaaggtgctgaatgcgattgtacatcctgcagtccgcaagaagatgctcgctgagaaagaagctcatatccgctcaggcgccaagacggttgtgctggatatcccgctgctgttcgaatccggattgacccattgggtcgacaaagtgctcgtggtgtacgtcgatgatgatgttcagttacgccgccttatggcacgtaacgggtttaccgaagaagaagctctggcccgcattcgttcacagtggcccatggccgagaaagttaaacgtgcagacgctgtaatcgacaataatggcacgattgaagaaacccgccgccagctgctggccattttacaccagtgggatgcactgggtaagggtggctccggccaccatcatcaccatcac

SEQ ID NO: 92 - protein, 211 aa, synthetic construct
  REGION 1..211: note = Variant of 3'O-kinase
MAFTIGLTGGIASGKSTVSAMMRELGLPVIDADEAARAVVMPGEEAYRQIVAAFGPGILRADGEIDRAKLGAIVFNDEQQRKVLNAIVHPAVRKKMLAEKEAHIRSGAKTVVLDIPLLFESGLTHWVDKVLVVYVDDDVQLRRLMARNGFTEEEALARIRSQWPMAEKVKRADAVIDNNGTIEETRRQLLAILHQWDALGKGGSGHHHHHH

SEQ ID NO: 93 - DNA, 633 bp, synthetic construct
  misc_feature 1..633: note = Variant of 3'O-kinase
  source 1..633: mol_type = other DNA
atggcgtttaccattggtttaacaggagggatcgcaagcggcaaatcgactgtgagtgccatgatgcgtgaactgggtctgccggtcatcgatgctgacgaggcagcacgcgccgttgttcgtccaggcgaagaagcttatcgccagattgtagctgcgttcggtccgggcattcttcgtgccgatggcgagatcgatcgcgccaaattgggtgccatcgtgtttaacgacgaacaacaacgtaaggtgctgaatgcgattgtacatcctgcagtccgcaagaagatgctcgctgagaaagaagctcatatccgctcaggcgccaagacggttgtgctggatatcccgctgctgttcgaatccggattgacccattgggtcgacaaagtgctcgtggtgtacgtcgatgatgatgttcagttacgccgccttatggcacgtaacgggtttaccgaagaagaagctctggcccgcattcgttcacagtggcccatggccgagaaagttaaacgtgcagacgctgtaatcgacaatatgggcacgattgaagaaacccgccgccagctgctggccattttacaccagtgggatgcactgggtaagggtggctccggccaccatcatcaccatcac

SEQ ID NO: 94 - protein, 211 aa, synthetic construct
  REGION 1..211: note = Variant of 3'O-kinase
MAFTIGLTGGIASGKSTVSAMMRELGLPVIDADEAARAVVRPGEEAYRQIVAAFGPGILRADGEIDRAKLGAIVFNDEQQRKVLNAIVHPAVRKKMLAEKEAHIRSGAKTVVLDIPLLFESGLTHWVDKVLVVYVDDDVQLRRLMARNGFTEEEALARIRSQWPMAEKVKRADAVIDNMGTIEETRRQLLAILHQWDALGKGGSGHHHHHH

SEQ ID NO: 95 - DNA, 633 bp, synthetic construct
  misc_feature 1..633: note = Variant of 3'O-kinase
  source 1..633: mol_type = other DNA
atggcgtttaccattggtttaacaggagggatcgcaagcggcaaatcgactgtgagtgccatgatgcgtgaactgggtctgccggtcatcgatgctgacgaggcagcacgcgccgttgttcgtccaggcgaagaagcttatcgccagattgtagctgcgttcggtccgggcattcttcgtgccgatggcgagatcgatcgcgccaaattgggtgccatcgtgtttaacgacgaacaacaacgtaaggtgctgaatgcgattgtacatcctgcagtccgcaagaagatgctcgctgagaaagaagctcatatccgctcaggcgccaagacggttgtgctggatatcccgctgctgttcgaatccggattgacccattgggtcgacaaagtgctcgtggtgtacgtcgatgatgatgttcagttacgccgccttatggcacgtaacgggtttaccgaagaagaagctctggcccgcattcgttcacagtggcccatggccgagaaagttaaacgtgcagacgctgtaatcgaccgtaatggcacgattgaagaaacccgccgccagctgctggccattttacaccagtgggatgcactgggtaagggtggctccggccaccatcatcaccatcac

SEQ ID NO: 96 - protein, 211 aa, synthetic construct
  REGION 1..211: note = Variant of 3'O-kinase
MAFTIGLTGGIASGKSTVSAMMRELGLPVIDADEAARAVVRPGEEAYRQIVAAFGPGILRADGEIDRAKLGAIVFNDEQQRKVLNAIVHPAVRKKMLAEKEAHIRSGAKTVVLDIPLLFESGLTHWVDKVLVVYVDDDVQLRRLMARNGFTEEEALARIRSQWPMAEKVKRADAVIDRNGTIEETRRQLLAILHQWDALGKGGSGHHHHHH

SEQ ID NO: 97 - DNA, 633 bp, synthetic construct
  misc_feature 1..633: note = Variant of 3'O-kinase
  source 1..633: mol_type = other DNA
atggcgtttaccattggtttaacaggagggatcgcaagcggcaaatcgactgtgagtgccatgatgcgtgaactgggtctgccggtcatcgatgctgacgaggcagcacgcgccgttgttcgtccaggcgaagaagcttatcgccagattgtagctgcgttcggtccgggcattcttcgtgccgatggcgagatcgatcgcgccaaattgggtgccatcgtgtttaacgacgaacaacaacgtaaggtgctgaatgcgattgtacatcctgcagtccgcaagaagatgctcgctgagaaagaagctcatatccgctcaggcgccaagacggttgtgctggatatcccgctgctgttcgaatccggattgacccattgggtcgacaaagtgctcgtggtgtacgtcgatgatgatgttcagttacgccgccttatggcacgtaacgggatgaccgaagaagaagctctggcccgcattcgttcacagtggcccatggccgagaaagttaaacgtgcagacgctgtaatcgacaataatggcacgattgaagaaacccgccgccagctgctggccattttacaccagtgggatgcactgggtaagggtggctccggccaccatcatcaccatcac

SEQ ID NO: 98 - protein, 211 aa, synthetic construct
  REGION 1..211: note = Variant of 3'O-kinase
MAFTIGLTGGIASGKSTVSAMMRELGLPVIDADEAARAVVRPGEEAYRQIVAAFGPGILRADGEIDRAKLGAIVFNDEQQRKVLNAIVHPAVRKKMLAEKEAHIRSGAKTVVLDIPLLFESGLTHWVDKVLVVYVDDDVQLRRLMARNGMTEEEALARIRSQWPMAEKVKRADAVIDNNGTIEETRRQLLAILHQWDALGKGGSGHHHHHH

SEQ ID NO: 99 - DNA, 633 bp, synthetic construct
  misc_feature 1..633: note = Variant of 3'O-kinase
  source 1..633: mol_type = other DNA
atggcgtttaccattggtttaacaggagggatcgcaagcggcaaatcgactgtgagtgccatgatgcgtgaactgggtctgccggtcatcgatgctgacgaggcagcacgcgccgttgttcgtccaggcgaagaagcttatcgccagattgtagctgcgttcggtccgggcattcttttggccgatggcgagatcgatcgcgccaaattgggtgccatcgtgtttaacgacgaacaacaacgtaaggtgctgaatgcgattgtacatcctgcagtccgcaagaagatgctcgctgagaaagaagctcatatccgctcaggcgccaagacggttgtgctggatatcccgctgctgttcgaatccggattgacccattgggtcgacaaagtgctcgtggtgtacgtcgatgatgatgttcagttacgccgccttatggcacgtaacgggtttaccgaagaagaagctctggcccgcattcgttcacagtggcccatggccgagaaagttaaacgtgcagacgctgtaatcgacaataatggcacgattgaagaaacccgccgccagctgctggccattttacaccagtgggatgcactgggtaagggtggctccggccaccatcatcaccatcac

SEQ ID NO: 100 - protein, 211 aa, synthetic construct
  REGION 1..211: note = Variant of 3'O-kinase
MAFTIGLTGGIASGKSTVSAMMRELGLPVIDADEAARAVVRPGEEAYRQIVAAFGPGILLADGEIDRAKLGAIVFNDEQQRKVLNAIVHPAVRKKMLAEKEAHIRSGAKTVVLDIPLLFESGLTHWVDKVLVVYVDDDVQLRRLMARNGFTEEEALARIRSQWPMAEKVKRADAVIDNNGTIEETRRQLLAILHQWDALGKGGSGHHHHHH

SEQ ID NO: 101 - DNA, 633 bp, synthetic construct
  misc_feature 1..633: note = Variant of 3'O-kinase
  source 1..633: mol_type = other DNA
atggcgtttaccattggtttaacaggagggatcgcaagcggcaaatcgactgtgagtgccatgatgcgtgaactgggtctgccggtcatcgatgctgacgaggcagcacgcgccgttgttcgtccaggcgaagaagcttatcgccagattgtagctgcgttcggtccgggcattcttcgtgccgatggcgagatcgatcgcgccaaattgggtgccatcgtgtttaacgacgaacaacaacgtaaggtgctgaatgcgattgtacatcctgcagtccgcaagaagatgctcgctgagaaagaagctcatatccgctcaggcgccaagacggttgtgctggatatcccgctgctgttcgaatccggattgacccattgggtcgacaaagtgctcgtggtgtacgtcgatgatgatgttcagttacgccgccttatggcacgtggggggtttaccgaagaagaagctctggcccgcattcgttcacagtggcccatggccgagaaagttaaacgtgcagacgctgtaatcgacaataatggcacgattgaagaaacccgccgccagctgctggccattttacaccagtgggatgcactgggtaagggtggctccggccaccatcatcaccatcac

SEQ ID NO: 102 - protein, 211 aa, synthetic construct
  REGION 1..211: note = Variant of 3'O-kinase
MAFTIGLTGGIASGKSTVSAMMRELGLPVIDADEAARAVVRPGEEAYRQIVAAFGPGILRADGEIDRAKLGAIVFNDEQQRKVLNAIVHPAVRKKMLAEKEAHIRSGAKTVVLDIPLLFESGLTHWVDKVLVVYVDDDVQLRRLMARGGFTEEEALARIRSQWPMAEKVKRADAVIDNNGTIEETRRQLLAILHQWDALGKGGSGHHHHHH

SEQ ID NO: 103 - DNA, 633 bp, synthetic construct
  misc_feature 1..633: note = Variant of 3'O-kinase
  source 1..633: mol_type = other DNA
atggcgtttaccattggtttaacaggagggatcgcaagcggcaaatcgactgtgagtgccatgatgcgtgaactgggtctgccggtcatcgatgctgacgaggcagcacgcgccgttgttcgtccaggcgaagaagcttatcgccagattgtagctgcgttcggtccgggcattcttcgtgccgatggcgagatcgatcgcgccaaattgggtgccatcgtgtttaacgacgaacaacaacgtaaggtgctgaatgcgattgtacatcctgcagtccgcaagaagatgctcgctgagaaagaagctcatatccgctcaggcgccaagacggttgtgctggatatcccgctgctgttcgaatccggattgacccattgggtcgacaaagtgctcgtggtgtacgtcgatgatgatgttcagttacgccgccttatggcacgtaacgggtttaccgaagaagaagctctggcccgcattcgttcacagagtcccatggccgagaaagttaaacgtgcagacgctgtaatcgacaataatggcacgattgaagaaacccgccgccagctgctggccattttacaccagtgggatgcactgggtaagggtggctccggccaccatcatcaccatcac

SEQ ID NO: 104 - protein, 211 aa, synthetic construct
  REGION 1..211: note = Variant of 3'O-kinase
MAFTIGLTGGIASGKSTVSAMMRELGLPVIDADEAARAVVRPGEEAYRQIVAAFGPGILRADGEIDRAKLGAIVFNDEQQRKVLNAIVHPAVRKKMLAEKEAHIRSGAKTVVLDIPLLFESGLTHWVDKVLVVYVDDDVQLRRLMARNGFTEEEALARIRSQSPMAEKVKRADAVIDNNGTIEETRRQLLAILHQWDALGKGGSGHHHHHH

SEQ ID NO: 105 - DNA, 633 bp, synthetic construct
  misc_feature 1..633: note = Variant of 3'O-kinase
  source 1..633: mol_type = other DNA
atggcgtttaccattggtttaacaggagggatcgcaagcggcaaatcgactgtgagtgccatgatgcgtgaactgggtctgccggtcatcgatgctgacgaggcagcacgcgccgttgttcgtccaggcgaagaagcttatcgccagattgtagctgcgttcggtccgggcattcttcgtgccgatggcgagatcgatcgcgccaaattgggtgccatcgtgtttaacgacgaacaacaacgtaaggtgctgaatgcgattgtacatcctgcagtccgcaagaagatgctcgctgagaaagaagctcatatccgctcaggcgccaagacggttgtgctggatatcccgctgctgttcgaatccggattgacccattgggtcgacaaagtgctcgtggtgtacgtcgatgatgatgttcagttacgccgcgtgatggcacgtaacgggtttaccgaagaagaagctctggcccgcattcgttcacagtggcccatggccgagaaagttaaacgtgcagacgctgtaatcgacaataatggcacgattgaagaaacccgccgccagctgctggccattttacaccagtgggatgcactgggtaagggtggctccggccaccatcatcaccatcac

SEQ ID NO: 106 - protein, 211 aa, synthetic construct
  REGION 1..211: note = Variant of 3'O-kinase
MAFTIGLTGGIASGKSTVSAMMRELGLPVIDADEAARAVVRPGEEAYRQIVAAFGPGILRADGEIDRAKLGAIVFNDEQQRKVLNAIVHPAVRKKMLAEKEAHIRSGAKTVVLDIPLLFESGLTHWVDKVLVVYVDDDVQLRRVMARNGFTEEEALARIRSQWPMAEKVKRADAVIDNNGTIEETRRQLLAILHQWDALGKGGSGHHHHHH

SEQ ID NO: 107 - DNA, 633 bp, synthetic construct
  misc_feature 1..633: note = Variant of 3'O-kinase
  source 1..633: mol_type = other DNA
atggcgtttaccattggtttaacaggagggatcgcaagcggcaaatcgactgtgagtgccatgatgcgtgaactgggtctgccggtcatcgatgctgacgaggcagcacgcgccgttgttcgtccaggcgaagaagcttatcgccagattgtagctgcgttcggtccgggcattcttcgtgccgatggcgagatcgatcgcgccaaattgggtgccatcgtgtttaacgacgaacaacaacgtaaggtgctgaatgcgattgtacatcctgcagtccgcaagaagatgctcgctgagaaagaagctcatatccgctcaggcgccaagacggttgtgctggatatcccgctgctgttcgaatccggattgacccattgggtcgacaaagtgctcgtggtgtacgtcgatgattcggttcagttacgccgccttatggcacgtaacgggtttaccgaagaagaagctctggcccgcattcgttcacagtggcccatggccgagaaagttaaacgtgcagacgctgtaatcgacaataatggcacgattgaagaaacccgccgccagctgctggccattttacaccagtgggatgcactgggtaagggtggctccggccaccatcatcaccatcac

SEQ ID NO: 108 - protein, 211 aa, synthetic construct
  REGION 1..211: note = Variant of 3'O-kinase
MAFTIGLTGGIASGKSTVSAMMRELGLPVIDADEAARAVVRPGEEAYRQIVAAFGPGILRADGEIDRAKLGAIVFNDEQQRKVLNAIVHPAVRKKMLAEKEAHIRSGAKTVVLDIPLLFESGLTHWVDKVLVVYVDDSVQLRRLMARNGFTEEEALARIRSQWPMAEKVKRADAVIDNNGTIEETRRQLLAILHQWDALGKGGSGHHHHHH

SEQ ID NO: 109 - DNA, 633 bp, synthetic construct
  misc_feature 1..633: note = Variant of 3'O-kinase
  source 1..633: mol_type = other DNA
atggcgtttaccattggtttaacaggagggatcgcaagcggcaaatcgactgtgagtgccatgatgcgtgaactgggtctgccggtcatcgatgctgacgaggcagcacgcgccgttgttcgtccaggcgaagaagcttatcgccagattgtagctgcgttcggtccgggcattcttcgtgccgatggcgagatcgatcgcgccaaattgggtgccatcgtgtttaacgacgaacaacaacgtaaggtgctgaatgcgattgtaagtcctgcagtccgcaagaagatgctcgctgagaaagaagctcatatccgctcaggcgccaagacggttgtgctggatatcccgctgctgttcgaatccggattgacccattgggtcgacaaagtgctcgtggtgtacgtcgatgatgatgttcagttacgccgccttatggcacgtaacgggtttaccgaagaagaagctctggcccgcattcgttcacagtggcccatggccgagaaagttaaacgtgcagacgctgtaatcgacaataatggcacgattgaagaaacccgccgccagctgctggccattttacaccagtgggatgcactgggtaagggtggctccggccaccatcatcaccatcac

SEQ ID NO: 110 - protein, 211 aa, synthetic construct
  REGION 1..211: note = Variant of 3'O-kinase
MAFTIGLTGGIASGKSTVSAMMRELGLPVIDADEAARAVVRPGEEAYRQIVAAFGPGILRADGEIDRAKLGAIVFNDEQQRKVLNAIVSPAVRKKMLAEKEAHIRSGAKTVVLDIPLLFESGLTHWVDKVLVVYVDDDVQLRRLMARNGFTEEEALARIRSQWPMAEKVKRADAVIDNNGTIEETRRQLLAILHQWDALGKGGSGHHHHHH

SEQ ID NO: 111 - DNA, 633 bp, synthetic construct
  misc_feature 1..633: note = Variant of 3'O-kinase
  source 1..633: mol_type = other DNA
atggcgtttaccattggtttaacaggagggatcgcaagcggcaaatcgactgtgagtgccatgatgcgtgaactgggtctgccggtcatcgatgctgacgaggcagcacgcgccgttgttcgtccaggcgaagaagcttatcgccagattgtagctgcgttcggtccgggcattcttcgtgccgatggcgagatcgatcgcgccaaattgggtgccatcgtgtttaacgacgaacaacaacgtaaggtgctgaatgcgattgtacatcctgcagctcgcaagaagatgctcgctgagaaagaagctcatatccgctcaggcgccaagacggttgtgctggatatcccgctgctgttcgaatccggattgacccattgggtcgacaaagtgctcgtggtgtacgtcgatgatgatgttcagttacgccgccttatggcacgtaacgggtttaccgaagaagaagctctggcccgcattcgttcacagtggcccatggccgagaaagttaaacgtgcagacgctgtaatcgacaataatggcacgattgaagaaacccgccgccagctgctggccattttacaccagtgggatgcactgggtaagggtggctccggccaccatcatcaccatcac

SEQ ID NO: 112 - protein, 211 aa, synthetic construct
  REGION 1..211: note = Variant of 3'O-kinase
MAFTIGLTGGIASGKSTVSAMMRELGLPVIDADEAARAVVRPGEEAYRQIVAAFGPGILRADGEIDRAKLGAIVFNDEQQRKVLNAIVHPAARKKMLAEKEAHIRSGAKTVVLDIPLLFESGLTHWVDKVLVVYVDDDVQLRRLMARNGFTEEEALARIRSQWPMAEKVKRADAVIDNNGTIEETRRQLLAILHQWDALGKGGSGHHHHHH

SEQ ID NO: 113 - DNA, 633 bp, synthetic construct
  misc_feature 1..633: note = Variant of 3'O-kinase
  source 1..633: mol_type = other DNA
atggcgtttaccattggtttaacaggagggatcgcaagcggcaaatcgactgtgagtgccatgatgcgtgaactgggtctgccggtcatcgatgctgacgaggcaacgcgcgccgttgttcgtccaggcgaagaagcttatcgccagattgtagctgcgttcggtccgggcattcttcgtgccgatggcgagatcgatcgcgccaaattgggtgccatcgtgtttaacgacgaacaacaacgtaaggtgctgaatgcgattgtacatcctgcagtccgcaagaagatgctcgctgagaaagaagctcatatccgctcaggcgccaagacggttgtgctggatatcccgctgctgttcgaatccggattgacccattgggtcgacaaagtgctcgtggtgtacgtcgatgatgatgttcagttacgccgccttatggcacgtaacgggtttaccgaagaagaagctctggcccgcattcgttcacagtggcccatggccgagaaagttaaacgtgcagacgctgtaatcgacaataatggcacgattgaagaaacccgccgccagctgctggccattttacaccagtgggatgcactgggtaagggtggctccggccaccatcatcaccatcac

SEQ ID NO: 114 - protein, 211 aa, synthetic construct
  REGION 1..211: note = Variant of 3'O-kinase
MAFTIGLTGGIASGKSTVSAMMRELGLPVIDADEATRAVVRPGEEAYRQIVAAFGPGILRADGEIDRAKLGAIVFNDEQQRKVLNAIVHPAVRKKMLAEKEAHIRSGAKTVVLDIPLLFESGLTHWVDKVLVVYVDDDVQLRRLMARNGFTEEEALARIRSQWPMAEKVKRADAVIDNNGTIEETRRQLLAILHQWDALGKGGSGHHHHHH

SEQ ID NO: 115 - DNA, 633 bp, synthetic construct
  misc_feature 1..633: note = Variant of 3'O-kinase
  source 1..633: mol_type = other DNA
atggcgtttaccattggtttaacaggagggatcgcaagcggcaaatcgactgtgagtgccatgatgcgtgaactgggtctgccggtcatcgatgctgacgaggcagcacgcgccgttgttcgtccaggcgaagaagcttatcgccagattgtagctgcgttcggtccgggcattcttcgtgccgatggcgagatcgatcgcgccaaattgggtgccatcgtgtttaacgacgaacaacaacgtaaggtgctgaatgcgattgtaggtcctgcagtccgcaagaagatgctcgctgagaaagaagctcatatccgctcaggcgccaagacggttgtgctggatatcccgctgctgttcgaatccggattgacccattgggtcgacaaagtgctcgtggtgtacgtcgatgatgatgttcagttacgccgccttatggcacgtaacgggtttaccgaagaagaagctctggcccgcattcgttcacagtggcccatggccgagaaagttaaacgtgcagacgctgtaatcgacaataatggcacgattgaagaaacccgccgccagctgctggccattttacaccagtgggatgcactgggtaagggtggctccggccaccatcatcaccatcac

SEQ ID NO: 116 - protein, 211 aa, synthetic construct
  REGION 1..211: note = Variant of 3'O-kinase
MAFTIGLTGGIASGKSTVSAMMRELGLPVIDADEAARAVVRPGEEAYRQIVAAFGPGILRADGEIDRAKLGAIVFNDEQQRKVLNAIVGPAVRKKMLAEKEAHIRSGAKTVVLDIPLLFESGLTHWVDKVLVVYVDDDVQLRRLMARNGFTEEEALARIRSQWPMAEKVKRADAVIDNNGTIEETRRQLLAILHQWDALGKGGSGHHHHHH

SEQ ID NO: 117 - DNA, 633 bp, synthetic construct
  misc_feature 1..633: note = Variant of 3'O-kinase
  source 1..633: mol_type = other DNA
atggcgtttaccattggtttaacaggagggatcgcaagcggcaaatcgactgtgagtgccatgatgcgtgaactgggtctgccggtcatcgatgctgacgaggcagcacgcgccgttgttcgtccaggcgaagaagcttatcgccagattgtagctgcgttcggtccgggcattcttcgtgccgatggcgagatcgatcgcgccaaattgggtgccatcatgtttaacgacgaacaacaacgtaaggtgctgaatgcgattgtacatcctgcagtccgcaagaagatgctcgctgagaaagaagctcatatccgctcaggcgccaagacggttgtgctggatatcccgctgctgttcgaatccggattgacccattgggtcgacaaagtgctcgtggtgtacgtcgatgatgatgttcagttacgccgccttatggcacgtaacgggtttaccgaagaagaagctctggcccgcattcgttcacagtggcccatggccgagaaagttaaacgtgcagacgctgtaatcgacaataatggcacgattgaagaaacccgccgccagctgctggccattttacaccagtgggatgcactgggtaagggtggctccggccaccatcatcaccatcac

SEQ ID NO: 118 - protein, 211 aa, synthetic construct
  REGION 1..211: note = Variant of 3'O-kinase
MAFTIGLTGGIASGKSTVSAMMRELGLPVIDADEAARAVVRPGEEAYRQIVAAFGPGILRADGEIDRAKLGAIMFNDEQQRKVLNAIVHPAVRKKMLAEKEAHIRSGAKTVVLDIPLLFESGLTHWVDKVLVVYVDDDVQLRRLMARNGFTEEEALARIRSQWPMAEKVKRADAVIDNNGTIEETRRQLLAILHQWDALGKGGSGHHHHHH

SEQ ID NO: 119 - DNA, 633 bp, synthetic construct
  misc_feature 1..633: note = Variant of 3'O-kinase
  source 1..633: mol_type = other DNA
atggcgtttaccattggtttaacaggagggatcgcaagcggcaaatcgactgtgagtgccatgatgcgtgaactgggtctgccggtcatcgatgctgacgagtcggcacgcgccgttgttcgtccaggcgaagaagcttatcgccagattgtagctgcgttcggtccgggcattcttcgtgccgatggcgagatcgatcgcgccaaattgggtgccatcgtgtttaacgacgaacaacaacgtaaggtgctgaatgcgattgtacatcctgcagtccgcaagaagatgctcgctgagaaagaagctcatatccgctcaggcgccaagacggttgtgctggatatcccgctgctgttcgaatccggattgacccattgggtcgacaaagtgctcgtggtgtacgtcgatgatgatgttcagttacgccgccttatggcacgtaacgggtttaccgaagaagaagctctggcccgcattcgttcacagtggcccatggccgagaaagttaaacgtgcagacgctgtaatcgacaataatggcacgattgaagaaacccgccgccagctgctggccattttacaccagtgggatgcactgggtaagggtggctccggccaccatcatcaccatcac

SEQ ID NO: 120 - protein, 211 aa, synthetic construct
  REGION 1..211: note = Variant of 3'O-kinase
MAFTIGLTGGIASGKSTVSAMMRELGLPVIDADESARAVVRPGEEAYRQIVAAFGPGILRADGEIDRAKLGAIVFNDEQQRKVLNAIVHPAVRKKMLAEKEAHIRSGAKTVVLDIPLLFESGLTHWVDKVLVVYVDDDVQLRRLMARNGFTEEEALARIRSQWPMAEKVKRADAVIDNNGTIEETRRQLLAILHQWDALGKGGSGHHHHHH

SEQ ID NO: 121 - DNA, 633 bp, synthetic construct
  misc_feature 1..633: note = Variant of 3'O-kinase
  source 1..633: mol_type = other DNA
atggcgtttaccattggtttaacaggagggatcgcaagcggcaaatcgactgtgagtgccatgatgcgtgaactgggtctgccggtcatcgatggtgacgaggcagcacgcgccgttgttcgtccaggcgaagaagcttatcgccagattgtagctgcgttcggtccgggcattcttcgtgccgatggcgagatcgatcgcgccaaattgggtgccatcgtgtttaacgacgaacaacaacgtaaggtgctgaatgcgattgtacatcctgcagtccgcaagaagatgctcgctgagaaagaagctcatatccgctcaggcgccaagacggttgtgctggatatcccgctgctgttcgaatccggattgacccattgggtcgacaaagtgctcgtggtgtacgtcgatgatgatgttcagttacgccgccttatggcacgtaacgggtttaccgaagaagaagctctggcccgcattcgttcacagtggcccatggccgagaaagttaaacgtgcagacgctgtaatcgacaataatggcacgattgaagaaacccgccgccagctgctggccattttacaccagtgggatgcactgggtaagggtggctccggccaccatcatcaccatcac

SEQ ID NO: 122 - protein, 211 aa, synthetic construct
  REGION 1..211: note = Variant of 3'O-kinase
MAFTIGLTGGIASGKSTVSAMMRELGLPVIDGDEAARAVVRPGEEAYRQIVAAFGPGILRADGEIDRAKLGAIVFNDEQQRKVLNAIVHPAVRKKMLAEKEAHIRSGAKTVVLDIPLLFESGLTHWVDKVLVVYVDDDVQLRRLMARNGFTEEEALARIRSQWPMAEKVKRADAVIDNNGTIEETRRQLLAILHQWDALGKGGSGHHHHHH

SEQ ID NO: 123 - DNA, 633 bp, synthetic construct
  misc_feature 1..633: note = Variant of 3'O-kinase
  source 1..633: mol_type = other DNA
atggcgtttaccattggtttaacaggagggatcgcaagcggcaaatcgactgtgagtgccatgatgcgtgaactgggtctgccggtcatcgatgctgacgaggcagcacgcgccgttgttcgtccaggcgaagaagcttatcgccagattgtagctgcgttcggtccgggcattcttcgtgccgatggcgagatcgatcgcgccaaattgggtgccatcgtgtttaacgacgaacaacaacgtaaggtgctgaatgcgattgtacatcctgcagtccgcaagaagatgctcgctgagaaagaagctcatatccgctcaggcgccaagacggttgtgctggatatcccgctgctgttcgaatccggattgacccattgggtcgacaaagtgctcgtggtgtacgtcgatgatgatgttcagttacgccgccttatggcacgtaacgggtggaccgaagaagaagctctggcccgcattcgttcacagtggcccatggccgagaaagttaaacgtgcagacgctgtaatcgacaataatggcacgattgaagaaacccgccgccagctgctggccattttacaccagtgggatgcactgggtaagggtggctccggccaccatcatcaccatcac

SEQ ID NO: 124 - protein, 211 aa, synthetic construct
  REGION 1..211: note = Variant of 3'O-kinase
MAFTIGLTGGIASGKSTVSAMMRELGLPVIDADEAARAVVRPGEEAYRQIVAAFGPGILRADGEIDRAKLGAIVFNDEQQRKVLNAIVHPAVRKKMLAEKEAHIRSGAKTVVLDIPLLFESGLTHWVDKVLVVYVDDDVQLRRLMARNGWTEEEALARIRSQWPMAEKVKRADAVIDNNGTIEETRRQLLAILHQWDALGKGGSGHHHHHH

SEQ ID NO: 125 - DNA, 633 bp, synthetic construct
  misc_feature 1..633: note = Variant of 3'O-kinase
  source 1..633: mol_type = other DNA
atggcgtttaccattggtttaacaggagggatcgcaagcggcaaatcgactgtgagtgccatgatgcgtgaactgggtctgccggtcatcgatgctgacgaggcagcacgcgccgttgttcgtccaggcgaagaagcttatcgccagattgtagctgcgttcggtccgggcattcttcgtgccgatggcgagatcgatcgcgccaaattgggtgccatcgtgtttgcggacgaacaacaacgtaaggtgctgaatgcgattgtacatcctgcagtccgcaagaagatgctcgctgagaaagaagctcatatccgctcaggcgccaagacggttgtgctggatatcccgctgctgttcgaatccggattgacccattgggtcgacaaagtgctcgtggtgtacgtcgatgatgatgttcagttacgccgccttatggcacgtaacgggtttaccgaagaagaagctctggcccgcattcgttcacagtggcccatggccgagaaagttaaacgtgcagacgctgtaatcgacaataatggcacgattgaagaaacccgccgccagctgctggccattttacaccagtgggatgcactgggtaagggtggctccggccaccatcatcaccatcac

SEQ ID NO: 126 - protein, 211 aa, synthetic construct
  REGION 1..211: note = Variant of 3'O-kinase
MAFTIGLTGGIASGKSTVSAMMRELGLPVIDADEAARAVVRPGEEAYRQIVAAFGPGILRADGEIDRAKLGAIVFADEQQRKVLNAIVHPAVRKKMLAEKEAHIRSGAKTVVLDIPLLFESGLTHWVDKVLVVYVDDDVQLRRLMARNGFTEEEALARIRSQWPMAEKVKRADAVIDNNGTIEETRRQLLAILHQWDALGKGGSGHHHHHH

SEQ ID NO: 127 - DNA, 633 bp, synthetic construct
  misc_feature 1..633: note = Variant of 3'O-kinase
  source 1..633: mol_type = other DNA
atggcgtttaccattggtttaacaggagggatcgcaagcggcaaatcgactgtgagtgccatgatgcgtgaactgggtctgccggtcatcgatgctgacgaggcagcacgcgccgttatgcgtccaggcgaagaagcttatcgccagattgtagctgcgttcggtccgggcattcttcgtgccgatggcgagatcgatcgcgccaaattgggtgccatcgtgtttaacgacgaacaacaacgtaaggtgctgaatgcgattgtacatcctgcagtccgcaagaagatgctcgctgagaaagaagctcatatccgctcaggcgccaagacggttgtgctggatatcccgctgctgttcgaatccggattgacccattgggtcgacaaagtgctcgtggtgtacgtcgatgatgatgttcagttacgccgccttatggcacgtaacgggtttaccgaagaagaagctctggcccgcattcgttcacagtggcccatggccgagaaagttaaacgtgcagacgctgtaatcgacaataatggcacgattgaagaaacccgccgccagctgctggccattttacaccagtgggatgcactgggtaagggtggctccggccaccatcatcaccatcac

SEQ ID NO: 128 - protein, 211 aa, synthetic construct
  REGION 1..211: note = Variant of 3'O-kinase
MAFTIGLTGGIASGKSTVSAMMRELGLPVIDADEAARAVMRPGEEAYRQIVAAFGPGILRADGEIDRAKLGAIVFNDEQQRKVLNAIVHPAVRKKMLAEKEAHIRSGAKTVVLDIPLLFESGLTHWVDKVLVVYVDDDVQLRRLMARNGFTEEEALARIRSQWPMAEKVKRADAVIDNNGTIEETRRQLLAILHQWDALGKGGSGHHHHHH

SEQ ID NO: 129 - DNA, 633 bp, synthetic construct
  misc_feature 1..633: note = Variant of 3'O-kinase
  source 1..633: mol_type = other DNA
atggcgtttaccattggtttaacaggagggatcgcaagcggcaaatcgactgtgagtgccatgatgcgtgaactgggtctgccggtcatcgatgctgacgaggcagcacgcgccgttgttcgtccaggcgaagaagcttatcgccagattgtagctgcgttcggtccgggcattcttcgtgccgatggcgagatcgatcgcgccaaattgggtgccatcgtgtttaacgacgaacaacaacgtaaggtgctgaatgcgattgtacatcctgcagtccgcaagaagatgctcgctgagaaagaagctcatatccgctcaggcgccaagacggttgtgctggatatcccgctgctgttcgaatccggattgacccattgggtcgacaaagtgctcgtggtgtacgtcgatgatgatgttcagttacgccgccttatggcacgtaacgggtttaccgaagaagaagctatggcccgcattcgttcacagtggcccatggccgagaaagttaaacgtgcagacgctgtaatcgacaataatggcacgattgaagaaacccgccgccagctgctggccattttacaccagtgggatgcactgggtaagggtggctccggccaccatcatcaccatcac

SEQ ID NO: 130 - protein, 211 aa, synthetic construct
  REGION 1..211: note = Variant of 3'O-kinase
MAFTIGLTGGIASGKSTVSAMMRELGLPVIDADEAARAVVRPGEEAYRQIVAAFGPGILRADGEIDRAKLGAIVFNDEQQRKVLNAIVHPAVRKKMLAEKEAHIRSGAKTVVLDIPLLFESGLTHWVDKVLVVYVDDDVQLRRLMARNGFTEEEAMARIRSQWPMAEKVKRADAVIDNNGTIEETRRQLLAILHQWDALGKGGSGHHHHHH

SEQ ID NO: 131 - DNA, 633 bp, synthetic construct
  misc_feature 1..633: note = Variant of 3'O-kinase
  source 1..633: mol_type = other DNA
atggcgtttaccattggtttaacaggagggatcgcaagcggcaaatcgactgtgagtgccatgatgcgtgaactgggtctgccggtcatcgatgctgacgaggcagcacgcgccgttgttcgtccaggcgaagaagcttatcgccagattgtagctgcgttcggtccgggcattcttcgtgccgatggcgagatcgatcgcgccaaattgggtgccatcgtgtttaacgacgaacaacaacgtaaggtgctgaatgcgattgtacatcctgcagtccgcaagaagatgctcgctgagaaagaagctcatatccgctcaggcgccaagacggttgtgctggatatcccgctgctgttcgaatccggagttacccattgggtcgacaaagtgctcgtggtgtacgtcgatgatgatgttcagttacgccgccttatggcacgtaacgggtttaccgaagaagaagctctggcccgcattcgttcacagtggcccatggccgagaaagttaaacgtgcagacgctgtaatcgacaataatggcacgattgaagaaacccgccgccagctgctggccattttacaccagtgggatgcactgggtaagggtggctccggccaccatcatcaccatcac

SEQ ID NO: 132 - protein, 211 aa, synthetic construct
  REGION 1..211: note = Variant of 3'O-kinase
MAFTIGLTGGIASGKSTVSAMMRELGLPVIDADEAARAVVRPGEEAYRQIVAAFGPGILRADGEIDRAKLGAIVFNDEQQRKVLNAIVHPAVRKKMLAEKEAHIRSGAKTVVLDIPLLFESGVTHWVDKVLVVYVDDDVQLRRLMARNGFTEEEALARIRSQWPMAEKVKRADAVIDNNGTIEETRRQLLAILHQWDALGKGGSGHHHHHH

SEQ ID NO: 133 - DNA, 633 bp, synthetic construct
  misc_feature 1..633: note = Variant of 3'O-kinase
  source 1..633: mol_type = other DNA
atggcgtttaccattggtttaacaggagggatcgcaagcggcaaatcgcaggtgagtgccatgatgcgtgaactgggtctgccggtcatcgatgctgacgaggcagcacgcgccgttgttcgtccaggcgaagaagcttatcgccagattgtagctgcgttcggtccgggcattcttcgtgccgatggcgagatcgatcgcgccaaattgggtgccatcgtgtttaacgacgaacaacaacgtaaggtgctgaatgcgattgtacatcctgcagtccgcaagaagatgctcgctgagaaagaagctcatatccgctcaggcgccaagacggttgtgctggatatcccgctgctgttcgaatccggattgacccattgggtcgacaaagtgctcgtggtgtacgtcgatgatgatgttcagttacgccgccttatggcacgtaacgggtttaccgaagaagaagctctggcccgcattcgttcacagtggcccatggccgagaaagttaaacgtgcagacgctgtaatcgacaataatggcacgattgaagaaacccgccgccagctgctggccattttacaccagtgggatgcactgggtaagggtggctccggccaccatcatcaccatcac

SEQ ID NO: 134 - protein, 211 aa, synthetic construct
  REGION 1..211: note = Variant of 3'O-kinase
MAFTIGLTGGIASGKSQVSAMMRELGLPVIDADEAARAVVRPGEEAYRQIVAAFGPGILRADGEIDRAKLGAIVFNDEQQRKVLNAIVHPAVRKKMLAEKEAHIRSGAKTVVLDIPLLFESGLTHWVDKVLVVYVDDDVQLRRLMARNGFTEEEALARIRSQWPMAEKVKRADAVIDNNGTIEETRRQLLAILHQWDALGKGGSGHHHHHH

SEQ ID NO: 135 - DNA, 633 bp, synthetic construct
  misc_feature 1..633: note = Variant of 3'O-kinase
  source 1..633: mol_type = other DNA
atggcgtttaccattggtttaacaggagggatcgcaagcggcaaatcgactgtgagtgccatgatgcgtgaactgggtctgccggtcatcgatgctgacgaggcagcacgcgccgttgttcgtccaggcgaagaagcttatcgccagattgtagctgcgttcggtccgggcattcttcgtgccgatggcgagatcgatcgcgccaaattgggtgccatcgtgtttaacgacgaacaacaacgtaaggtgctgaatgcgattgtacatcctgcagtccgcaagaagatgctcgctgagaaagaagctcatatccgctcaggcgccaagacggttgtgctggatatcccgctgctgttcgaatccggattgacccattgggtcgacaaagtgctcgtggtgtacgtcgatgatgatgttcagttacgccgccttatggcacgtaacgggtttaccgaagaagaagctctggcccgcattcgttcacagtggcccatggccgagaaagttaaacgtgcagacgctgtaatcgactctaatggcacgattgaagaaacccgccgccagctgctggccattttacaccagtgggatgcactgggtaagggtggctccggccaccatcatcaccatcac

SEQ ID NO: 136 - protein, 211 aa, synthetic construct
  REGION 1..211: note = Variant of 3'O-kinase
MAFTIGLTGGIASGKSTVSAMMRELGLPVIDADEAARAVVRPGEEAYRQIVAAFGPGILRADGEIDRAKLGAIVFNDEQQRKVLNAIVHPAVRKKMLAEKEAHIRSGAKTVVLDIPLLFESGLTHWVDKVLVVYVDDDVQLRRLMARNGFTEEEALARIRSQWPMAEKVKRADAVIDSNGTIEETRRQLLAILHQWDALGKGGSGHHHHHH

SEQ ID NO: 137 - DNA, 633 bp, synthetic construct
  misc_feature 1..633: note = Variant of 3'O-kinase
  source 1..633: mol_type = other DNA
atggcgtttaccattggtttaacaggagggatcgcaagcggcaaatcgactgtgagtgccatgatgcgtgaactgggtctgccggtcatcgatgctgacgaggcagcacgcgccgttgttcgtccaggcgaagaagcttatcgccagattgtagctgcgttcggtccgggcattcttcgtgccgatggcgagatcgatcgcgccaaattgggtgccatcgtgtttaacgacgaacaacaacgtaaggtgctgaatgcgattgtacatcctgcagtccgcaagaagatgctcgctgagaaagaagctcatatccgctcaggcgccaagacggttgtgctggatatctcgctgctgttcgaatccggattgacccattgggtcgacaaagtgctcgtggtgtacgtcgatgatgatgttcagttacgccgccttatggcacgtaacgggtttaccgaagaagaagctctggcccgcattcgttcacagtggcccatggccgagaaagttaaacgtgcagacgctgtaatcgacaataatggcacgattgaagaaacccgccgccagctgctggccattttacaccagtgggatgcactgggtaagggtggctccggccaccatcatcaccatcac

SEQ ID NO: 138 - protein, 211 aa, synthetic construct
  REGION 1..211: note = Variant of 3'O-kinase
MAFTIGLTGGIASGKSTVSAMMRELGLPVIDADEAARAVVRPGEEAYRQIVAAFGPGILRADGEIDRAKLGAIVFNDEQQRKVLNAIVHPAVRKKMLAEKEAHIRSGAKTVVLDISLLFESGLTHWVDKVLVVYVDDDVQLRRLMARNGFTEEEALARIRSQWPMAEKVKRADAVIDNNGTIEETRRQLLAILHQWDALGKGGSGHHHHHH

SEQ ID NO: 139 - DNA, 633 bp, synthetic construct
  misc_feature 1..633: note = Variant of 3'O-kinase
  source 1..633: mol_type = other DNA
atggcgtttaccattggtttaacaggagggatcgcagtaggcaaatcgactgtgagtgccatgatgcgtgaactgggtctgccggtcatcgatgctgacgaggcaacccgcgaagtgatgcgtccaggcgaagaagcttatcgccagattgtagctgcgttcggtccgggcattcttcgtgccgatggcgagatcgatcgcgccaaattgggtcgtatcaagtttaacgacgaacaacaacgtaaggtgctgaatgcgattgtactgcctgcagtctataagaagatgctcgctgagaaagaagctcatatccgctcaggcgccaagacggttgtgctggatatcccgctgctgttcgaatccggattgacccattgggtcgacaaagtgctcgtggtgtacgtcgatgatgatgttcagttacgccgccttatggcacgtaacgggtttaccgaagaagaagctctggcccgcattcgttcacagtggcccatggccgagaaagttaaacgtgcagacgctgtaatcgacaataatggcacgattgaagaaacccgccgccagctgctggccattttacaccagtgggatgcactgggtaagggtggctccggccaccatcatcaccatcac

SEQ ID NO: 140 - protein, 211 aa, synthetic construct
  REGION 1..211: note = Variant of 3'O-kinase
MAFTIGLTGGIAVGKSTVSAMMRELGLPVIDADEATREVMRPGEEAYRQIVAAFGPGILRADGEIDRAKLGRIKFNDEQQRKVLNAIVLPAVYKKMLAEKEAHIRSGAKTVVLDIPLLFESGLTHWVDKVLVVYVDDDVQLRRLMARNGFTEEEALARIRSQWPMAEKVKRADAVIDNNGTIEETRRQLLAILHQWDALGKGGSGHHHHHH

SEQ ID NO: 141 - DNA, 633 bp, synthetic construct
  misc_feature 1..633: note = Variant of 3'O-kinase
  source 1..633: mol_type = other DNA
atggcgtttaccattggtttaacaggagggatcgcatcgggcaaatcgactgtgagtgccatgatgcgtgaactgggtctgccggtcatcgatgctgacgaggcagcacgcgccgttgttcgtccaggcgaagaagcttatcgccagattgtagctgcgttcggtccgggcattcttcgtgccgatggcgagatcgatcgcgccaaattgggtgctatcgtgtttgctgacgaacaacaacgtaaggtgctgaatgcgattgtaggtcctgcagtctataagaagatgctcgctgagaaagaagctcatatccgctcaggcgccaagacggttgtgctggatatcccgctgctgttcgaatccggattgacccattgggtcgacaaagtgctcgtggtgtacgtcgatgatgatgttcagttacgccgccttatggcacgtaacgggtttaccgaagaagaagctctggcccgcattcgttcacagtggcccagtgccgagaaagttaaacgtgcagacgctgtaatcgacaataatggcacgattgaagaaacccgccgccagctgctggccattttacaccagtgggatgcactgggtaagggtggctccggccaccatcatcaccatcac

SEQ ID NO: 142 - protein, 211 aa, synthetic construct
  REGION 1..211: note = Variant of 3'O-kinase
MAFTIGLTGGIASGKSTVSAMMRELGLPVIDADEAARAVVRPGEEAYRQIVAAFGPGILRADGEIDRAKLGAIVFADEQQRKVLNAIVGPAVYKKMLAEKEAHIRSGAKTVVLDIPLLFESGLTHWVDKVLVVYVDDDVQLRRLMARNGFTEEEALARIRSQWPSAEKVKRADAVIDNNGTIEETRRQLLAILHQWDALGKGGSGHHHHHH

SEQ ID NO: 143 - DNA, 633 bp, synthetic construct
  misc_feature 1..633: note = Variant of 3'O-kinase
  source 1..633: mol_type = other DNA
atggcgtttaccattggtttaacaggagggatcgcatcgggcaaatcgactgtgagtgccatgatgcgtgaactgggtctgccggtcatcgatgctgacgaggcaacccgcgcagtgatgcgtccaggcgaagaagcttatcgccagattgtagctgcgttcggtccgggcattcttcgtgccgatggcgagatcgatcgcgccaaattgggtcgtatcaagtttaacgacgaacaacaacgtaaggtgctgaatgcgattgtaggtcctgcagtctataagaagatgctcgctgagaaagaagctcatatccgctcaggcgccaagacggttgtgctggatatcccgctgctgttcgaatccggattgactcattgggtcgacaaagtgctcgtggtgtacgtcgatgatgatgttcagttacgccgccttatggcacgtaacgggtttaccgaagaagaagctctggcccgcattcgttcacagtggcccatggccgagaaagttaaacgtgcagacgctgtaatcgacaataatggcacgattgaagaaacccgccgccagctgctggccattttacaccagtgggatgcactgggtaagggtggctccggccaccatcatcaccatcac

SEQ ID NO: 144 - protein, 211 aa, synthetic construct
  REGION 1..211: note = Variant of 3'O-kinase
MAFTIGLTGGIASGKSTVSAMMRELGLPVIDADEATRAVMRPGEEAYRQIVAAFGPGILRADGEIDRAKLGRIKFNDEQQRKVLNAIVGPAVYKKMLAEKEAHIRSGAKTVVLDIPLLFESGLTHWVDKVLVVYVDDDVQLRRLMARNGFTEEEALARIRSQWPMAEKVKRADAVIDNNGTIEETRRQLLAILHQWDALGKGGSGHHHHHH

SEQ ID NO: 145 - DNA, 633 bp, synthetic construct
  misc_feature 1..633: note = Variant of 3'O-kinase
  source 1..633: mol_type = other DNA
atggcgtttaccattggtttaacaggagggatcgcatcgggcaaatcgactgtgagtgccatgatgcgtgaactgggtctgccggtcatcgatgctgacgaggcagcacgcgccgttgttcgtccaggcgaagaagcttatcgccagattgtagctgcgttcggtccgggcattcttcgtgccgatggcgagatcgatcgcgccaaattgggtcgtatcgtgtttaacgacgaacaacaacgtaaggtgctgaatgcgattgtactgcctgcagtccgtaagaagatgctcgctgagaaagaagctcatatccgctcaggcgccaagacggttgtgctggatatcccgctgctgttcgaatccggattgacccattgggtcgacaaagtgctcgtggtgtacgtcgatgatgatgttcagttacgccgccttatggcacgtaacgggtttaccgaagaagaagctctggcccgcattcgttcacagtggcccagtgccgagaaagttaaacgtgcagacgctgtaatcgacaataatggcacgattgaagaaacccgccgccagctgctggccattttacaccagtgggatgcactgggtaagggtggctccggccaccatcatcaccatcac

SEQ ID NO: 146 - protein, 211 aa, synthetic construct
  REGION 1..211: note = Variant of 3'O-kinase
MAFTIGLTGGIASGKSTVSAMMRELGLPVIDADEAARAVVRPGEEAYRQIVAAFGPGILRADGEIDRAKLGRIVFNDEQQRKVLNAIVLPAVRKKMLAEKEAHIRSGAKTVVLDIPLLFESGLTHWVDKVLVVYVDDDVQLRRLMARNGFTEEEALARIRSQWPSAEKVKRADAVIDNNGTIEETRRQLLAILHQWDALGKGGSGHHHHHH

SEQ ID NO: 147 - DNA, 633 bp, synthetic construct
  misc_feature 1..633: note = Variant of 3'O-kinase
  source 1..633: mol_type = other DNA
atggcgtttaccattggtttaacaggagggatcgcagtaggcaaatcgactgtgagtgccatgatgcgtgaactgggtctgccggtcatcgatgctgacgaggcagcccgcgaactgatgcgtccaggcgaagaagcttatcgccagattgtagctgcgttcggtccgggcattcttcgtgccgatggcgagatcgatcgcgccaaattgggtgctatcgtgtttaacgacgaacaacaacgtaaggtgctgaatgcgattgtactgcctgcagtccgtaagaagatgctcgctgagaaagaagctcatatccgctcaggcgccaagacggttgtgctggatatcccgctgctgttcgaatccggattgtggcattgggtcgacaaagtgctcgtggtgtacgtcgatgatgatgttcagttacgccgccttatggcacgtaacgggtttaccgaagaagaagctatggcccgcattcgttcacagtggcccatggccgagaaagttaaacgtgcagacgctgtaatcgacaataatggcacgattgaagaaacccgccgccagctgctggccattttacaccagtgggatgcactgggtaagggtggctccggccaccatcatcaccatcac

SEQ ID NO: 148 - protein, 211 aa, synthetic construct
  REGION 1..211: note = Variant of 3'O-kinase
MAFTIGLTGGIAVGKSTVSAMMRELGLPVIDADEAARELMRPGEEAYRQIVAAFGPGILRADGEIDRAKLGAIVFNDEQQRKVLNAIVLPAVRKKMLAEKEAHIRSGAKTVVLDIPLLFESGLWHWVDKVLVVYVDDDVQLRRLMARNGFTEEEAMARIRSQWPMAEKVKRADAVIDNNGTIEETRRQLLAILHQWDALGKGGSGHHHHHH

SEQ ID NO: 149 - DNA, 633 bp, synthetic construct
  misc_feature 1..633: note = Variant of 3'O-kinase
  source 1..633: mol_type = other DNA
atggcgtttaccattggtttaacaggagggatcgcatcgggcaaatcgactgtgagtgccatgatgcgtgaactgggtctgccggtcatcgatgctgacgaggcaacccgcgaagtgatgcgtccaggcgaagaagcttatcgccagattgtagctgcgttcggtccgggcattcttcgtgccgatggcgagatcgatcgcgccaaattgggtcgtatcaagtttaacgacgaacaacaacgtaaggtgctgaatgcgattgtaagtcctgcagtctataagaagatgctcgctgagaaagaagctcatatccgctcaggcgccaagacggttgtgctggatatcccgctgctgttcgaatccggattgtggcattgggtcgacaaagtgctcgtggtgtacgtcgatgatgatgttcagttacgccgccttatggcacgtaacgggtttaccgaagaagaagctatggcccgcattcgttcacagtggcccatggccgagaaagttaaacgtgcagacgctgtaatcgacaataatggcacgattgaagaaacccgccgccagctgctggccattttacaccagtgggatgcactgggtaagggtggctccggccaccatcatcaccatcac

SEQ ID NO: 150 - protein, 211 aa, synthetic construct
  REGION 1..211: note = Variant of 3'O-kinase
MAFTIGLTGGIASGKSTVSAMMRELGLPVIDADEATREVMRPGEEAYRQIVAAFGPGILRADGEIDRAKLGRIKFNDEQQRKVLNAIVSPAVYKKMLAEKEAHIRSGAKTVVLDIPLLFESGLWHWVDKVLVVYVDDDVQLRRLMARNGFTEEEAMARIRSQWPMAEKVKRADAVIDNNGTIEETRRQLLAILHQWDALGKGGSGHHHHHH

SEQ ID NO: 151 - DNA, 633 bp, synthetic construct
  misc_feature 1..633: note = Variant of 3'O-kinase
  source 1..633: mol_type = other DNA
atggcgtttaccattggtttaacaggagggatcgcagtaggcaaatcgactgtgagtgccatgatgcgtgaactgggtctgccggtcatcgatgctgacgaggcagcacgcgccgttgttcgtccaggcgaagaagcttatcgccagattgtagctgcgttcggtccgggcattcttcgtgccgatggcgagatcgatcgcgccaaattgggtgctatcaagtttaacgacgaacaacaacgtaaggtgctgaatgcgattgtactgcctgcagtctataagaagatgctcgctgagaaagaagctcatatccgctcaggcgccaagacggttgtgctggatatcccgctgctgttcgaatccggattgacccattgggtcgacaaagtgctcgtggtgtacgtcgatgatgatgttcagttacgccgccttatggcacgtaacgggtttaccgaagaagaagctctggcccgcattcgttcacagtggcccatggccgagaaagttaaacgtgcagacgctgtaatcgacaataatggcacgattgaagaaacccgccgccagctgctggccattttacaccagtgggatgcactgggtaagggtggctccggccaccatcatcaccatcac

SEQ ID NO: 152 - protein, 211 aa, synthetic construct
  REGION 1..211: note = Variant of 3'O-kinase
MAFTIGLTGGIAVGKSTVSAMMRELGLPVIDADEAARAVVRPGEEAYRQIVAAFGPGILRADGEIDRAKLGAIKFNDEQQRKVLNAIVLPAVYKKMLAEKEAHIRSGAKTVVLDIPLLFESGLTHWVDKVLVVYVDDDVQLRRLMARNGFTEEEALARIRSQWPMAEKVKRADAVIDNNGTIEETRRQLLAILHQWDALGKGGSGHHHHHH

SEQ ID NO: 153 - DNA, 633 bp, synthetic construct
  misc_feature 1..633: note = Variant of 3'O-kinase
  source 1..633: mol_type = other DNA
atggcgtttaccattggtttaacaggagggatcgcatcgggcaaatcgactgtgagtgccatgatgcgtgaactgggtctgccggtcatcgatgctgacgaggcagcacgcgccgttgttcgtccaggcgaagaagcttatcgccagattgtagctgcgttcggtccgggcattcttcgtgccgatggcgagatcgatcgcgccaaattgggtgctatcgtgtttgctgacgaacaacaacgtaaggtgctgaatgcgattgtactgcctgcagtccgtaagaagatgctcgctgagaaagaagctcatatccgctcaggcgccaagacggttgtgctggatatcccgctgctgttcgaatccggattggttcattgggtcgacaaagtgctcgtggtgtacgtcgatgatgatgttcagttacgccgccttatggcacgtaacgggtttaccgaagaagaagctctggcccgcattcgttcacagtggcccagtgccgagaaagttaaacgtgcagacgctgtaatcgacaataatggcacgattgaagaaacccgccgccagctgctggccattttacaccagtgggatgcactgggtaagggtggctccggccaccatcatcaccatcac

SEQ ID NO: 154 - protein, 211 aa, synthetic construct
  REGION 1..211: note = Variant of 3'O-kinase
MAFTIGLTGGIASGKSTVSAMMRELGLPVIDADEAARAVVRPGEEAYRQIVAAFGPGILRADGEIDRAKLGAIVFADEQQRKVLNAIVLPAVRKKMLAEKEAHIRSGAKTVVLDIPLLFESGLVHWVDKVLVVYVDDDVQLRRLMARNGFTEEEALARIRSQWPSAEKVKRADAVIDNNGTIEETRRQLLAILHQWDALGKGGSGHHHHHH

SEQ ID NO: 155 - DNA, 633 bp, synthetic construct
  misc_feature 1..633: note = Variant of 3'O-kinase
  source 1..633: mol_type = other DNA
atggcgtttaccattggtttaacaggagggatcgcagcgggcaaatcgactgtgagtgccatgatgcgtgaactgggtctgccggtcatcgatgctgacgaggcagcccgcgaagtgatgcgtccaggcgaagaagcttatcgccagattgtagctgcgttcggtccgggcattcttcgtgccgatggcgagatcgatcgcgccaaattgggtgctatcgtgtttaacgacgaacaacaacgtaaggtgctgaatgcgattgtaggtcctgcagtccgtaagaagatgctcgctgagaaagaagctcatatccgctcaggcgccaagacggttgtgctggatatcccgctgctgttcgaatccggattgacccattgggtcgacaaagtgctcgtggtgtacgtcgatgatgatgttcagttacgccgccttatggcacgtaacgggtttaccgaagaagaagctctggcccgcattcgttcacagtggcccatggccgagaaagttaaacgtgcagacgctgtaatcgacaataatggcacgattgaagaaacccgccgccagctgctggccattttacaccagtgggatgcactgggtaagggtggctccggccaccatcatcaccatcac

SEQ ID NO: 156 - protein, 211 aa, synthetic construct
  REGION 1..211: note = Variant of 3'O-kinase
MAFTIGLTGGIAAGKSTVSAMMRELGLPVIDADEAAREVMRPGEEAYRQIVAAFGPGILRADGEIDRAKLGAIVFNDEQQRKVLNAIVGPAVRKKMLAEKEAHIRSGAKTVVLDIPLLFESGLTHWVDKVLVVYVDDDVQLRRLMARNGFTEEEALARIRSQWPMAEKVKRADAVIDNNGTIEETRRQLLAILHQWDALGKGGSGHHHHHH

SEQ ID NO: 157 - DNA, 633 bp, synthetic construct
  misc_feature 1..633: note = Variant of 3'O-kinase
  source 1..633: mol_type = other DNA
atggcgtttaccattggtttaacaggagggatcgcagcgggcaaatcgactgtgagtgccatgatgcgtgaactgggtctgccggtcatcgatgctgacgaggcaacccgcgaagtgatgcgtccaggcgaagaagcttatcgccagattgtagctgcgttcggtccgggcattcttcgtgccgatggcgagatcgatcgcgccaaattgggtcgtatcgtgtttgctgacgaacaacaacgtaaggtgctgaatgcgattgtaggtcctgcagtccgtaagaagatgctcgctgagaaagaagctcatatccgctcaggcgccaagacggttgtgctggatatcccgctgctgttcgaatccggattgactcattgggtcgacaaagtgctcgtggtgtacgtcgatgatgatgttcagttacgccgccttatggcacgtaacgggtttaccgaagaagaagctctggcccgcattcgttcacagtggcccatggccgagaaagttaaacgtgcagacgctgtaatcgacaataatggcacgattgaagaaacccgccgccagctgctggccattttacaccagtgggatgcactgggtaagggtggctccggccaccatcatcaccatcac

SEQ ID NO: 158 - protein, 211 aa, synthetic construct
  REGION 1..211: note = Variant of 3'O-kinase
MAFTIGLTGGIAAGKSTVSAMMRELGLPVIDADEATREVMRPGEEAYRQIVAAFGPGILRADGEIDRAKLGRIVFADEQQRKVLNAIVGPAVRKKMLAEKEAHIRSGAKTVVLDIPLLFESGLTHWVDKVLVVYVDDDVQLRRLMARNGFTEEEALARIRSQWPMAEKVKRADAVIDNNGTIEETRRQLLAILHQWDALGKGGSGHHHHHH

SEQ ID NO: 159 - DNA, 633 bp, synthetic construct
  misc_feature 1..633: note = Variant of 3'O-kinase
  source 1..633: mol_type = other DNA
atggcgtttaccattggtttaacaggagggatcgcagtaggcaaatcgactgtgagtgccatgatgcgtgaactgggtctgccggtcatcgatgctgacgaggcagcccgcgaactgatgcgtccaggcgaagaagcttatcgccagattgtagctgcgttcggtccgggcattcttcgtgccgatggcgagatcgatcgcgccaaattgggtcgtatcgtgtttgctgacgaacaacaacgtaaggtgctgaatgcgattgtacaccctgcagtctataagaagatgctcgctgagaaagaagctcatatccgctcaggcgccaagacggttgtgctggatatcccgctgctgttcgaatccggattgacccattgggtcgacaaagtgctcgtggtgtacgtcgatgatgatgttcagttacgccgccttatggcacgtaacgggtttaccgaagaagaagctctggcccgcattcgttcacagtggcccagtgccgagaaagttaaacgtgcagacgctgtaatcgacaataatggcacgattgaagaaacccgccgccagctgctggccattttacaccagtgggatgcactgggtaagggtggctccggccaccatcatcaccatcac

SEQ ID NO: 160 - protein, 211 aa, synthetic construct
  REGION 1..211: note = Variant of 3'O-kinase
MAFTIGLTGGIAVGKSTVSAMMRELGLPVIDADEAARELMRPGEEAYRQIVAAFGPGILRADGEIDRAKLGRIVFADEQQRKVLNAIVHPAVYKKMLAEKEAHIRSGAKTVVLDIPLLFESGLTHWVDKVLVVYVDDDVQLRRLMARNGFTEEEALARIRSQWPSAEKVKRADAVIDNNGTIEETRRQLLAILHQWDALGKGGSGHHHHHH

SEQ ID NO: 161 - DNA, 633 bp, synthetic construct
  misc_feature 1..633: note = Variant of 3'O-kinase
  source 1..633: mol_type = other DNA
atggcgtttaccattggtttaacaggagggatcgcatcgggcaaatcgactgtgagtgccatgatgcgtgaactgggtctgccggtcatcgatgctgacgaggcagcacgcgccgttgttcgtccaggcgaagaagcttatcgccagattgtagctgcgttcggtccgggcattcttcgtgccgatggcgagatcgatcgcgccaaattgggtgctatcaagtttaacgacgaacaacaacgtaaggtgctgaatgcgattgtactgcctgcagtctataagaagatgctcgctgagaaagaagctcatatccgctcaggcgccaagacggttgtgctggatatcccgctgctgttcgaatccggattgactcattgggtcgacaaagtgctcgtggtgtacgtcgatgatgatgttcagttacgccgccttatggcacgtaacgggtttaccgaagaagaagctatggcccgcattcgttcacagtggcccatggccgagaaagttaaacgtgcagacgctgtaatcgacaataatggcacgattgaagaaacccgccgccagctgctggccattttacaccagtgggatgcactgggtaagggtggctccggccaccatcatcaccatcac

SEQ ID NO: 162 - protein, 211 aa, synthetic construct
  REGION 1..211: note = Variant of 3'O-kinase
MAFTIGLTGGIASGKSTVSAMMRELGLPVIDADEAARAVVRPGEEAYRQIVAAFGPGILRADGEIDRAKLGAIKFNDEQQRKVLNAIVLPAVYKKMLAEKEAHIRSGAKTVVLDIPLLFESGLTHWVDKVLVVYVDDDVQLRRLMARNGFTEEEAMARIRSQWPMAEKVKRADAVIDNNGTIEETRRQLLAILHQWDALGKGGSGHHHHHH

SEQ ID NO: 163 - DNA, 633 bp, synthetic construct
  misc_feature 1..633: note = Variant of 3'O-kinase
  source 1..633: mol_type = other DNA
atggcgtttaccattggtttaacaggagggatcgcagcgggcaaatcgactgtgagtgccatgatgcgtgaactgggtctgccggtcatcgatgctgacgaggcaacccgcgcagtgatgcgtccaggcgaagaagcttatcgccagattgtagctgcgttcggtccgggcattcttcgtgccgatggcgagatcgatcgcgccaaattgggtcgtatcaagtttgctgacgaacaacaacgtaaggtgctgaatgcgattgtacaccctgcagtctataagaagatgctcgctgagaaagaagctcatatccgctcaggcgccaagacggttgtgctggatatcccgctgctgttcgaatccggattgacccattgggtcgacaaagtgctcgtggtgtacgtcgatgatgatgttcagttacgccgccttatggcacgtaacgggtttaccgaagaagaagctctggcccgcattcgttcacagtggcccatggccgagaaagttaaacgtgcagacgctgtaatcgacaataatggcacgattgaagaaacccgccgccagctgctggccattttacaccagtgggatgcactgggtaagggtggctccggccaccatcatcaccatcac

SEQ ID NO: 164 - protein, 211 aa, synthetic construct
  REGION 1..211: note = Variant of 3'O-kinase
MAFTIGLTGGIAAGKSTVSAMMRELGLPVIDADEATRAVMRPGEEAYRQIVAAFGPGILRADGEIDRAKLGRIKFADEQQRKVLNAIVHPAVYKKMLAEKEAHIRSGAKTVVLDIPLLFESGLTHWVDKVLVVYVDDDVQLRRLMARNGFTEEEALARIRSQWPMAEKVKRADAVIDNNGTIEETRRQLLAILHQWDALGKGGSGHHHHHH

SEQ ID NO: 165 - DNA, 633 bp, synthetic construct
  misc_feature 1..633: note = Variant of 3'O-kinase
  source 1..633: mol_type = other DNA
atggcgtttaccattggtttaacaggagggatcgcaagcggcaaatcgactgtgagtgccatgatgcgtgaactgggtctgccggtcatcgatgctgacgaggcagcacgcgccgttgttcgtccaggcgaagaagcttatcgccagattgtagctgcgttcggtccgggcattcttcgtgccgatggcgagatcgatcgcgccaaattgggtgctatcgtgtttgctgacgaacaacaacgtaaggtgctgaatgcgattgtaggtcctgcagtccgtaagaagatgctcgctgagaaagaagctcatatccgctcaggcgccaagacggttgtgctggatatcccgctgctgttcgaatccggattgacccattgggtcgacaaagtgctcgtggtgtacgtcgatgatgatgttcagttacgccgccttatggcacgtaacgggtttaccgaagaagaagctctggcccgcattcgttcacagtggcccagtgccgagaaagttaaacgtgcagacgctgtaatcgacaataatggcacgattgaagaaacccgccgccagctgctggccattttacaccagtgggatgcactgggtaagggtggctccggccaccatcatcaccatcac

SEQ ID NO: 166 - protein, 211 aa, synthetic construct
  REGION 1..211: note = Variant of 3'O-kinase
MAFTIGLTGGIASGKSTVSAMMRELGLPVIDADEAARAVVRPGEEAYRQIVAAFGPGILRADGEIDRAKLGAIVFADEQQRKVLNAIVGPAVRKKMLAEKEAHIRSGAKTVVLDIPLLFESGLTHWVDKVLVVYVDDDVQLRRLMARNGFTEEEALARIRSQWPSAEKVKRADAVIDNNGTIEETRRQLLAILHQWDALGKGGSGHHHHHH

SEQ ID NO: 167 - DNA, 633 bp, synthetic construct
  misc_feature 1..633: note = Variant of 3'O-kinase
  source 1..633: mol_type = other DNA
atggcgtttaccattggtttaacaggagggatcgcagtaggcaaatcgactgtgagtgccatgatgcgtgaactgggtctgccggtcatcgatgctgacgaggcaacccgcgaagtgatgcgtccaggcgaagaagcttatcgccagattgtagctgcgttcggtccgggcattcttcgtgccgatggcgagatcgatcgcgccaaattgggtcgtatcaagtttaacgacgaacaacaacgtaaggtgctgaatgcgattgtacaccctgcagtctataagaagatgctcgctgagaaagaagctcatatccgctcaggcgccaagacggttgtgctggatatcccgctgctgttcgaatccggattgacccattgggtcgacaaagtgctcgtggtgtacgtcgatgatgatgttcagttacgccgccttatggcacgtaacgggtttaccgaagaagaagctatggcccgcattcgttcacagtggcccatggccgagaaagttaaacgtgcagacgctgtaatcgacaataatggcacgattgaagaaacccgccgccagctgctggccattttacaccagtgggatgcactgggtaagggtggctccggccaccatcatcaccatcac

SEQ ID NO: 168 - protein, 211 aa, synthetic construct
  REGION 1..211: note = Variant of 3'O-kinase
MAFTIGLTGGIAVGKSTVSAMMRELGLPVIDADEATREVMRPGEEAYRQIVAAFGPGILRADGEIDRAKLGRIKFNDEQQRKVLNAIVHPAVYKKMLAEKEAHIRSGAKTVVLDIPLLFESGLTHWVDKVLVVYVDDDVQLRRLMARNGFTEEEAMARIRSQWPMAEKVKRADAVIDNNGTIEETRRQLLAILHQWDALGKGGSGHHHHHH

SEQ ID NO: 169 - DNA, 633 bp, synthetic construct
  misc_feature 1..633: note = Variant of 3'O-kinase
  source 1..633: mol_type = other DNA
atggcgtttaccattggtttaacaggagggatcgcagtaggcaaatcgactgtgagtgccatgatgcgtgaactgggtctgccggtcatcgatgctgacgaggcagcacgcgccgttgttcgtccaggcgaagaagcttatcgccagattgtagctgcgttcggtccgggcattcttcgtgccgatggcgagatcgatcgcgccaaattgggtcgtatcgtgtttgctgacgaacaacaacgtaaggtgctgaatgcgattgtaggtcctgcagtctataagaagatgctcgctgagaaagaagctcatatccgctcaggcgccaagacggttgtgctggatatcccgctgctgttcgaatccggattgactcattgggtcgacaaagtgctcgtggtgtacgtcgatgatgatgttcagttacgccgccttatggcacgtaacgggtttaccgaagaagaagctctggcccgcattcgttcacagtggcccatggccgagaaagttaaacgtgcagacgctgtaatcgacaataatggcacgattgaagaaacccgccgccagctgctggccattttacaccagtgggatgcactgggtaagggtggctccggccaccatcatcaccatcac

SEQ ID NO: 170 - protein, 211 aa, synthetic construct
  REGION 1..211: note = Variant of 3'O-kinase
MAFTIGLTGGIAVGKSTVSAMMRELGLPVIDADEAARAVVRPGEEAYRQIVAAFGPGILRADGEIDRAKLGRIVFADEQQRKVLNAIVGPAVYKKMLAEKEAHIRSGAKTVVLDIPLLFESGLTHWVDKVLVVYVDDDVQLRRLMARNGFTEEEALARIRSQWPMAEKVKRADAVIDNNGTIEETRRQLLAILHQWDALGKGGSGHHHHHH

SEQ ID NO: 171 - DNA, 633 bp, synthetic construct
  misc_feature 1..633: note = Variant of 3'O-kinase
  source 1..633: mol_type = other DNA
atggcgtttaccattggtttaacaggagggatcgcagtaggcaaatcgactgtgagtgccatgatgcgtgaactgggtctgccggtcatcgatgctgacgaggcagcacgcgccgttgttcgtccaggcgaagaagcttatcgccagattgtagctgcgttcggtccgggcattcttcgtgccgatggcgagatcgatcgcgccaaattgggtcgtatcgtgtttaacgacgaacaacaacgtaaggtgctgaatgcgattgtactgcctgcagtccgtaagaagatgctcgctgagaaagaagctcatatccgctcaggcgccaagacggttgtgctggatatcccgctgctgttcgaatccggattgtggcattgggtcgacaaagtgctcgtggtgtacgtcgatgatgatgttcagttacgccgccttatggcacgtaacgggtttaccgaagaagaagctctggcccgcattcgttcacagtggcccatggccgagaaagttaaacgtgcagacgctgtaatcgacaataatggcacgattgaagaaacccgccgccagctgctggccattttacaccagtgggatgcactgggtaagggtggctccggccaccatcatcaccatcac

SEQ ID NO: 172 - protein, 211 aa, synthetic construct
  REGION 1..211: note = Variant of 3'O-kinase
MAFTIGLTGGIAVGKSTVSAMMRELGLPVIDADEAARAVVRPGEEAYRQIVAAFGPGILRADGEIDRAKLGRIVFNDEQQRKVLNAIVLPAVRKKMLAEKEAHIRSGAKTVVLDIPLLFESGLWHWVDKVLVVYVDDDVQLRRLMARNGFTEEEALARIRSQWPMAEKVKRADAVIDNNGTIEETRRQLLAILHQWDALGKGGSGHHHHHH

SEQ ID NO: 173 - DNA, 633 bp, synthetic construct
  misc_feature 1..633: note = Variant of 3'O-kinase
  source 1..633: mol_type = other DNA
atggcgtttaccattggtttaacaggagggatcgcagcgggcaaatcgactgtgagtgccatgatgcgtgaactgggtctgccggtcatcgatgctgacgaggcagcacgcgccgttgttcgtccaggcgaagaagcttatcgccagattgtagctgcgttcggtccgggcattcttcgtgccgatggcgagatcgatcgcgccaaattgggtcgtatcgtgtttaacgacgaacaacaacgtaaggtgctgaatgcgattgtactgcctgcagtccgtaagaagatgctcgctgagaaagaagctcatatccgctcaggcgccaagacggttgtgctggatatcccgctgctgttcgaatccggattgtggcattgggtcgacaaagtgctcgtggtgtacgtcgatgatgatgttcagttacgccgccttatggcacgtaacgggtttaccgaagaagaagctctggcccgcattcgttcacagtggcccatggccgagaaagttaaacgtgcagacgctgtaatcgacaataatggcacgattgaagaaacccgccgccagctgctggccattttacaccagtgggatgcactgggtaagggtggctccggccaccatcatcaccatcac

SEQ ID NO: 174 - protein, 211 aa, synthetic construct
  REGION 1..211: note = Variant of 3'O-kinase
MAFTIGLTGGIAAGKSTVSAMMRELGLPVIDADEAARAVVRPGEEAYRQIVAAFGPGILRADGEIDRAKLGRIVFNDEQQRKVLNAIVLPAVRKKMLAEKEAHIRSGAKTVVLDIPLLFESGLWHWVDKVLVVYVDDDVQLRRLMARNGFTEEEALARIRSQWPMAEKVKRADAVIDNNGTIEETRRQLLAILHQWDALGKGGSGHHHHHH

SEQ ID NO: 175 - DNA, 633 bp, synthetic construct
  misc_feature 1..633: note = Variant of 3'O-kinase
  source 1..633: mol_type = other DNA
atggcgtttaccattggtttaacaggagggatcgcagtaggcaaatcgactgtgagtgccatgatgcgtgaactgggtctgccggtcatcgatgctgacgaggcagcacgcgccgttgttcgtccaggcgaagaagcttatcgccagattgtagctgcgttcggtccgggcattcttcgtgccgatggcgagatcgatcgcgccaaattgggtcgtatcaagtttgctgacgaacaacaacgtaaggtgctgaatgcgattgtactgcctgcagtctataagaagatgctcgctgagaaagaagctcatatccgctcaggcgccaagacggttgtgctggatatcccgctgctgttcgaatccggattgacccattgggtcgacaaagtgctcgtggtgtacgtcgatgatgatgttcagttacgccgccttatggcacgtaacgggtttaccgaagaagaagctctggcccgcattcgttcacagtggcccatggccgagaaagttaaacgtgcagacgctgtaatcgacaataatggcacgattgaagaaacccgccgccagctgctggccattttacaccagtgggatgcactgggtaagggtggctccggccaccatcatcaccatcac

SEQ ID NO: 176 - protein, 211 aa, synthetic construct
  REGION 1..211: note = Variant of 3'O-kinase
MAFTIGLTGGIAVGKSTVSAMMRELGLPVIDADEAARAVVRPGEEAYRQIVAAFGPGILRADGEIDRAKLGRIKFADEQQRKVLNAIVLPAVYKKMLAEKEAHIRSGAKTVVLDIPLLFESGLTHWVDKVLVVYVDDDVQLRRLMARNGFTEEEALARIRSQWPMAEKVKRADAVIDNNGTIEETRRQLLAILHQWDALGKGGSGHHHHHH

SEQ ID NO: 177 - DNA, 633 bp, synthetic construct
  misc_feature 1..633: note = Variant of 3'O-kinase
  source 1..633: mol_type = other DNA
atggcgtttaccattggtttaacaggagggatcgcagcgggcaaatcgactgtgagtgccatgatgcgtgaactgggtctgccggtcatcgatgctgacgaggcagcccgcgcagtgatgcgtccaggcgaagaagcttatcgccagattgtagctgcgttcggtccgggcattcttcgtgccgatggcgagatcgatcgcgccaaattgggtcgtatcgtgtttgctgacgaacaacaacgtaaggtgctgaatgcgattgtactgcctgcagtccgtaagaagatgctcgctgagaaagaagctcatatccgctcaggcgccaagacggttgtgctggatatcccgctgctgttcgaatccggattgacccattgggtcgacaaagtgctcgtggtgtacgtcgatgatgatgttcagttacgccgccttatggcacgtaacgggtttaccgaagaagaagctctggcccgcattcgttcacagtggcccatggccgagaaagttaaacgtgcagacgctgtaatcgacaataatggcacgattgaagaaacccgccgccagctgctggccattttacaccagtgggatgcactgggtaagggtggctccggccaccatcatcaccatcac

SEQ ID NO: 178 - protein, 211 aa, synthetic construct
  REGION 1..211: note = Variant of 3'O-kinase
MAFTIGLTGGIAAGKSTVSAMMRELGLPVIDADEAARAVMRPGEEAYRQIVAAFGPGILRADGEIDRAKLGRIVFADEQQRKVLNAIVLPAVRKKMLAEKEAHIRSGAKTVVLDIPLLFESGLTHWVDKVLVVYVDDDVQLRRLMARNGFTEEEALARIRSQWPMAEKVKRADAVIDNNGTIEETRRQLLAILHQWDALGKGGSGHHHHHH

SEQ ID NO: 179 - DNA, 633 bp, synthetic construct
  misc_feature 1..633: note = Variant of 3'O-kinase
  source 1..633: mol_type = other DNA
atggcgtttaccattggtttaacaggagggatcgcaagcggcaaatcgactgtgagtgccatgatgcgtgaactgggtctgccggtcatcgatgctgacgaggcaacccgcgaactgatgcgtccaggcgaagaagcttatcgccagattgtagctgcgttcggtccgggcattcttcgtgccgatggcgagatcgatcgcgccaaattgggtgctatcaagtttgctgacgaacaacaacgtaaggtgctgaatgcgattgtactgcctgcagtctataagaagatgctcgctgagaaagaagctcatatccgctcaggcgccaagacggttgtgctggatatcccgctgctgttcgaatccggattggttcattgggtcgacaaagtgctcgtggtgtacgtcgatgatgatgttcagttacgccgccttatggcacgtaacgggtttaccgaagaagaagctctggcccgcattcgttcacagtggcccatggccgagaaagttaaacgtgcagacgctgtaatcgacaataatggcacgattgaagaaacccgccgccagctgctggccattttacaccagtgggatgcactgggtaagggtggctccggccaccatcatcaccatcac

SEQ ID NO: 180 - protein, 211 aa, synthetic construct
  REGION 1..211: note = Variant of 3'O-kinase
MAFTIGLTGGIASGKSTVSAMMRELGLPVIDADEATRELMRPGEEAYRQIVAAFGPGILRADGEIDRAKLGAIKFADEQQRKVLNAIVLPAVYKKMLAEKEAHIRSGAKTVVLDIPLLFESGLVHWVDKVLVVYVDDDVQLRRLMARNGFTEEEALARIRSQWPMAEKVKRADAVIDNNGTIEETRRQLLAILHQWDALGKGGSGHHHHHH

SEQ ID NO: 181 - DNA, 633 bp, synthetic construct
  misc_feature 1..633: note = Variant of 3'O-kinase
  source 1..633: mol_type = other DNA
atggcgtttaccattggtttaacaggagggatcgcagtaggcaaatcgactgtgagtgccatgatgcgtgaactgggtctgccggtcatcgatgctgacgaggcagcccgcgaagtgatgcgtccaggcgaagaagcttatcgccagattgtagctgcgttcggtccgggcattcttcgtgccgatggcgagatcgatcgcgccaaattgggtgctatcgtgtttaacgacgaacaacaacgtaaggtgctgaatgcgattgtaggtcctgcagtccgtaagaagatgctcgctgagaaagaagctcatatccgctcaggcgccaagacggttgtgctggatatcccgctgctgttcgaatccggattgactcattgggtcgacaaagtgctcgtggtgtacgtcgatgatgatgttcagttacgccgccttatggcacgtaacgggtttaccgaagaagaagctctggcccgcattcgttcacagtggcccatggccgagaaagttaaacgtgcagacgctgtaatcgacaataatggcacgattgaagaaacccgccgccagctgctggccattttacaccagtgggatgcactgggtaagggtggctccggccaccatcatcaccatcac

SEQ ID NO: 182 - protein, 211 aa, synthetic construct
  REGION 1..211: note = Variant of 3'O-kinase
MAFTIGLTGGIAVGKSTVSAMMRELGLPVIDADEAAREVMRPGEEAYRQIVAAFGPGILRADGEIDRAKLGAIVFNDEQQRKVLNAIVGPAVRKKMLAEKEAHIRSGAKTVVLDIPLLFESGLTHWVDKVLVVYVDDDVQLRRLMARNGFTEEEALARIRSQWPMAEKVKRADAVIDNNGTIEETRRQLLAILHQWDALGKGGSGHHHHHH

SEQ ID NO: 183 - DNA, 633 bp, synthetic construct
  misc_feature 1..633: note = Variant of 3'O-kinase
  source 1..633: mol_type = other DNA
atggcgtttaccattggtttaacaggagggatcgcagtaggcaaatcgactgtgagtgccatgatgcgtgaactgggtctgccggtcatcgatgctgacgaggcagcacgcgccgttgttcgtccaggcgaagaagcttatcgccagattgtagctgcgttcggtccgggcattcttcgtgccgatggcgagatcgatcgcgccaaattgggtagtatcaagtttaacgacgaacaacaacgtaaggtgctgaatgcgattgtactgcctgcagtctataagaagatgctcgctgagaaagaagctcatatccgctcaggcgccaagacggttgtgctggatatcccgctgctgttcgaatccggattgactcattgggtcgacaaagtgctcgtggtgtacgtcgatgatgatgttcagttacgccgccttatggcacgtaacgggtttaccgaagaagaagctctggcccgcattcgttcacagtggcccatggccgagaaagttaaacgtgcagacgctgtaatcgacaataatggcacgattgaagaaacccgccgccagctgctggccattttacaccagtgggatgcactgggtaagggtggctccggccaccatcatcaccatcac

SEQ ID NO: 184 - protein, 211 aa, synthetic construct
  REGION 1..211: note = Variant of 3'O-kinase
MAFTIGLTGGIAVGKSTVSAMMRELGLPVIDADEAARAVVRPGEEAYRQIVAAFGPGILRADGEIDRAKLGSIKFNDEQQRKVLNAIVLPAVYKKMLAEKEAHIRSGAKTVVLDIPLLFESGLTHWVDKVLVVYVDDDVQLRRLMARNGFTEEEALARIRSQWPMAEKVKRADAVIDNNGTIEETRRQLLAILHQWDALGKGGSGHHHHHH

SEQ ID NO: 185 - DNA, 633 bp, synthetic construct
  misc_feature 1..633: note = Variant of 3'O-kinase
  source 1..633: mol_type = other DNA
atggcgtttaccattggtttaacaggagggatcgcagtaggcaaatcgactgtgagtgccatgatgcgtgaactgggtctgccggtcatcgatgctgacgaggcaacccgcgaagtgatgcgtccaggcgaagaagcttatcgccagattgtagctgcgttcggtccgggcattcttcgtgccgatggcgagatcgatcgcgccaaattgggtgctatcgtgtttaacgacgaacaacaacgtaaggtgctgaatgcgattgtaggtcctgcagtccgtaagaagatgctcgctgagaaagaagctcatatccgctcaggcgccaagacggttgtgctggatatcccgctgctgttcgaatccggattgacccattgggtcgacaaagtgctcgtggtgtacgtcgatgatgatgttcagttacgccgccttatggcacgtaacgggtttaccgaagaagaagctctggcccgcattcgttcacagtggcccatggccgagaaagttaaacgtgcagacgctgtaatcgacaataatggcacgattgaagaaacccgccgccagctgctggccattttacaccagtgggatgcactgggtaagggtggctccggccaccatcatcaccatcac

SEQ ID NO: 186 - protein, 211 aa, synthetic construct
  REGION 1..211: note = Variant of 3'O-kinase
MAFTIGLTGGIAVGKSTVSAMMRELGLPVIDADEATREVMRPGEEAYRQIVAAFGPGILRADGEIDRAKLGAIVFNDEQQRKVLNAIVGPAVRKKMLAEKEAHIRSGAKTVVLDIPLLFESGLTHWVDKVLVVYVDDDVQLRRLMARNGFTEEEALARIRSQWPMAEKVKRADAVIDNNGTIEETRRQLLAILHQWDALGKGGSGHHHHHH

SEQ ID NO: 187 - DNA, 633 bp, synthetic construct
  misc_feature 1..633: note = Variant of 3'O-kinase
  source 1..633: mol_type = other DNA
atggcgtttaccattggtttaacaggagggatcgcagcgggcaaatcgactgtgagtgccatgatgcgtgaactgggtctgccggtcatcgatgctgacgaggcagcacgcgccgttgttcgtccaggcgaagaagcttatcgccagattgtagctgcgttcggtccgggcattcttcgtgccgatggcgagatcgatcgcgccaaattgggtcgtatcgtgtttaacgacgaacaacaacgtaaggtgctgaatgcgattgtaagtcctgcagtctataagaagatgctcgctgagaaagaagctcatatccgctcaggcgccaagacggttgtgctggatatcccgctgctgttcgaatccggattggttcattgggtcgacaaagtgctcgtggtgtacgtcgatgatgatgttcagttacgccgccttatggcacgtaacgggtttaccgaagaagaagctatggcccgcattcgttcacagtggcccatggccgagaaagttaaacgtgcagacgctgtaatcgacaataatggcacgattgaagaaacccgccgccagctgctggccattttacaccagtgggatgcactgggtaagggtggctccggccaccatcatcaccatcac

SEQ ID NO: 188 - protein, 211 aa, synthetic construct
  REGION 1..211: note = Variant of 3'O-kinase
MAFTIGLTGGIAAGKSTVSAMMRELGLPVIDADEAARAVVRPGEEAYRQIVAAFGPGILRADGEIDRAKLGRIVFNDEQQRKVLNAIVSPAVYKKMLAEKEAHIRSGAKTVVLDIPLLFESGLVHWVDKVLVVYVDDDVQLRRLMARNGFTEEEAMARIRSQWPMAEKVKRADAVIDNNGTIEETRRQLLAILHQWDALGKGGSGHHHHHH

SEQ ID NO: 189 - DNA, 633 bp, synthetic construct
  misc_feature 1..633: note = Variant of 3'O-kinase
  source 1..633: mol_type = other DNA
atggcgtttaccattggtttaacaggagggatcgcagcgggcaaatcgactgtgagtgccatgatgcgtgaactgggtctgccggtcatcgatgctgacgaggcagcacgcgccgttgttcgtccaggcgaagaagcttatcgccagattgtagctgcgttcggtccgggcattcttcgtgccgatggcgagatcgatcgcgccaaattgggtgctatcgtgtttaacgacgaacaacaacgtaaggtgctgaatgcgattgtactgcctgcagtccgtaagaagatgctcgctgagaaagaagctcatatccgctcaggcgccaagacggttgtgctggatatcccgctgctgttcgaatccggattgacccattgggtcgacaaagtgctcgtggtgtacgtcgatgatgatgttcagttacgccgccttatggcacgtaacgggtttaccgaagaagaagctctggcccgcattcgttcacagtggcccagtgccgagaaagttaaacgtgcagacgctgtaatcgacaataatggcacgattgaagaaacccgccgccagctgctggccattttacaccagtgggatgcactgggtaagggtggctccggccaccatcatcaccatcac

SEQ ID NO: 190 - protein, 211 aa, synthetic construct
  REGION 1..211: note = Variant of 3'O-kinase
MAFTIGLTGGIAAGKSTVSAMMRELGLPVIDADEAARAVVRPGEEAYRQIVAAFGPGILRADGEIDRAKLGAIVFNDEQQRKVLNAIVLPAVRKKMLAEKEAHIRSGAKTVVLDIPLLFESGLTHWVDKVLVVYVDDDVQLRRLMARNGFTEEEALARIRSQWPSAEKVKRADAVIDNNGTIEETRRQLLAILHQWDALGKGGSGHHHHHH

SEQ ID NO: 191 - DNA, 633 bp, synthetic construct
  misc_feature 1..633: note = Variant of 3'O-kinase
  source 1..633: mol_type = other DNA
atggcgtttaccattggtttaacaggagggatcgcagtaggcaaatcgactgtgagtgccatgatgcgtgaactgggtctgccggtcatcgatgctgacgaggcagcacgcgccgttgttcgtccaggcgaagaagcttatcgccagattgtagctgcgttcggtccgggcattcttcgtgccgatggcgagatcgatcgcgccaaattgggtcgtatcgtgtttgctgacgaacaacaacgtaaggtgctgaatgcgattgtactgcctgcagtccgtaagaagatgctcgctgagaaagaagctcatatccgctcaggcgccaagacggttgtgctggatatcccgctgctgttcgaatccggattggttcattgggtcgacaaagtgctcgtggtgtacgtcgatgatgatgttcagttacgccgccttatggcacgtaacgggtttaccgaagaagaagctctggcccgcattcgttcacagtggcccatggccgagaaagttaaacgtgcagacgctgtaatcgacaataatggcacgattgaagaaacccgccgccagctgctggccattttacaccagtgggatgcactgggtaagggtggctccggccaccatcatcaccatcac

SEQ ID NO: 192 - protein, 211 aa, synthetic construct
  REGION 1..211: note = Variant of 3'O-kinase
MAFTIGLTGGIAVGKSTVSAMMRELGLPVIDADEAARAVVRPGEEAYRQIVAAFGPGILRADGEIDRAKLGRIVFADEQQRKVLNAIVLPAVRKKMLAEKEAHIRSGAKTVVLDIPLLFESGLVHWVDKVLVVYVDDDVQLRRLMARNGFTEEEALARIRSQWPMAEKVKRADAVIDNNGTIEETRRQLLAILHQWDALGKGGSGHHHHHH

SEQ ID NO: 193 - DNA, 633 bp, synthetic construct
  misc_feature 1..633: note = Variant of 3'O-kinase
  source 1..633: mol_type = other DNA
atggcgtttaccattggtttaacaggagggatcgcatcgggcaaatcgactgtgagtgccatgatgcgtgaactgggtctgccggtcatcgatgctgacgaggcagcacgcgccgttgttcgtccaggcgaagaagcttatcgccagattgtagctgcgttcggtccgggcattcttcgtgccgatggcgagatcgatcgcgccaaattgggtgctatcgtgtttaacgacgaacaacaacgtaaggtgctgaatgcgattgtactgcctgcagtctataagaagatgctcgctgagaaagaagctcatatccgctcaggcgccaagacggttgtgctggatatcccgctgctgttcgaatccggattgtggcattgggtcgacaaagtgctcgtggtgtacgtcgatgatgatgttcagttacgccgccttatggcacgtaacgggtttaccgaagaagaagctctggcccgcattcgttcacagtggcccatggccgagaaagttaaacgtgcagacgctgtaatcgacaataatggcacgattgaagaaacccgccgccagctgctggccattttacaccagtgggatgcactgggtaagggtggctccggccaccatcatcaccatcac

SEQ ID NO: 194 - protein, 211 aa, synthetic construct
  REGION 1..211: note = Variant of 3'O-kinase
MAFTIGLTGGIASGKSTVSAMMRELGLPVIDADEAARAVVRPGEEAYRQIVAAFGPGILRADGEIDRAKLGAIVFNDEQQRKVLNAIVLPAVYKKMLAEKEAHIRSGAKTVVLDIPLLFESGLWHWVDKVLVVYVDDDVQLRRLMARNGFTEEEALARIRSQWPMAEKVKRADAVIDNNGTIEETRRQLLAILHQWDALGKGGSGHHHHHH

SEQ ID NO: 195 - DNA, 633 bp, synthetic construct
  misc_feature 1..633: note = Variant of 3'O-kinase
  source 1..633: mol_type = other DNA
atggcgtttaccattggtttaacaggagggatcgcaagcggcaaatcgactgtgagtgccatgatgcgtgaactgggtctgccggtcatcgatgctgacgaggcagcacgcgccgttgttcgtccaggcgaagaagcttatcgccagattgtagctgcgttcggtccgggcattcttcgtgccgatggcgagatcgatcgcgccaaattgggtgctatcaagtttgctgacgaacaacaacgtaaggtgctgaatgcgattgtactgcctgcagtctataagaagatgctcgctgagaaagaagctcatatccgctcaggcgccaagacggttgtgctggatatcccgctgctgttcgaatccggattggttcattgggtcgacaaagtgctcgtggtgtacgtcgatgatgatgttcagttacgccgccttatggcacgtaacgggtttaccgaagaagaagctctggcccgcattcgttcacagtggcccatggccgagaaagttaaacgtgcagacgctgtaatcgacaataatggcacgattgaagaaacccgccgccagctgctggccattttacaccagtgggatgcactgggtaagggtggctccggccaccatcatcaccatcac

SEQ ID NO: 196 - protein, 211 aa, synthetic construct
  REGION 1..211: note = Variant of 3'O-kinase
MAFTIGLTGGIASGKSTVSAMMRELGLPVIDADEAARAVVRPGEEAYRQIVAAFGPGILRADGEIDRAKLGAIKFADEQQRKVLNAIVLPAVYKKMLAEKEAHIRSGAKTVVLDIPLLFESGLVHWVDKVLVVYVDDDVQLRRLMARNGFTEEEALARIRSQWPMAEKVKRADAVIDNNGTIEETRRQLLAILHQWDALGKGGSGHHHHHH

SEQ ID NO: 197 - DNA, 633 bp, synthetic construct
  misc_feature 1..633: note = Variant of 3'O-kinase
  source 1..633: mol_type = other DNA
atggcgtttaccattggtttaacaggagggatcgcagcgggcaaatcgactgtgagtgccatgatgcgtgaactgggtctgccggtcatcgatgctgacgaggcaacccgcgaagtgatgcgtccaggcgaagaagcttatcgccagattgtagctgcgttcggtccgggcattcttcgtgccgatggcgagatcgatcgcgccaaattgggtgctatcgtgtttgctgacgaacaacaacgtaaggtgctgaatgcgattgtaagtcctgcagtctataagaagatgctcgctgagaaagaagctcatatccgctcaggcgccaagacggttgtgctggatatcccgctgctgttcgaatccggattgactcattgggtcgacaaagtgctcgtggtgtacgtcgatgatgatgttcagttacgccgccttatggcacgtaacgggtttaccgaagaagaagctctggcccgcattcgttcacagtggcccatggccgagaaagttaaacgtgcagacgctgtaatcgacaataatggcacgattgaagaaacccgccgccagctgctggccattttacaccagtgggatgcactgggtaagggtggctccggccaccatcatcaccatcac

SEQ ID NO: 198 - protein, 211 aa, synthetic construct
  REGION 1..211: note = Variant of 3'O-kinase
MAFTIGLTGGIAAGKSTVSAMMRELGLPVIDADEATREVMRPGEEAYRQIVAAFGPGILRADGEIDRAKLGAIVFADEQQRKVLNAIVSPAVYKKMLAEKEAHIRSGAKTVVLDIPLLFESGLTHWVDKVLVVYVDDDVQLRRLMARNGFTEEEALARIRSQWPMAEKVKRADAVIDNNGTIEETRRQLLAILHQWDALGKGGSGHHHHHH

SEQ ID NO: 199 - DNA, 633 bp, synthetic construct
  misc_feature 1..633: note = Variant of 3'O-kinase
  source 1..633: mol_type = other DNA
atggcgtttaccattggtttaacaggagggatcgcagcgggcaaatcgactgtgagtgccatgatgcgtgaactgggtctgccggtcatcgatgctgacgaggcaacccgcgcagtgatgcgtccaggcgaagaagcttatcgccagattgtagctgcgttcggtccgggcattcttcgtgccgatggcgagatcgatcgcgccaaattgggtgctatcgtgtttaacgacgaacaacaacgtaaggtgctgaatgcgattgtacaccctgcagtctataagaagatgctcgctgagaaagaagctcatatccgctcaggcgccaagacggttgtgctggatatcccgctgctgttcgaatccggattggttcattgggtcgacaaagtgctcgtggtgtacgtcgatgatgatgttcagttacgccgccttatggcacgtaacgggtttaccgaagaagaagctctggcccgcattcgttcacagtggcccatggccgagaaagttaaacgtgcagacgctgtaatcgacaataatggcacgattgaagaaacccgccgccagctgctggccattttacaccagtgggatgcactgggtaagggtggctccggccaccatcatcaccatcac

SEQ ID NO: 200 - protein, 211 aa, synthetic construct
  REGION 1..211: note = Variant of 3'O-kinase
MAFTIGLTGGIAAGKSTVSAMMRELGLPVIDADEATRAVMRPGEEAYRQIVAAFGPGILRADGEIDRAKLGAIVFNDEQQRKVLNAIVHPAVYKKMLAEKEAHIRSGAKTVVLDIPLLFESGLVHWVDKVLVVYVDDDVQLRRLMARNGFTEEEALARIRSQWPMAEKVKRADAVIDNNGTIEETRRQLLAILHQWDALGKGGSGHHHHHH

SEQ ID NO: 201 - DNA, 633 bp, synthetic construct
  misc_feature 1..633: note = Variant of 3'O-kinase
  source 1..633: mol_type = other DNA
atggcgtttaccattggtttaacaggagggatcgcagtaggcaaatcgactgtgagtgccatgatgcgtgaactgggtctgccggtcatcgatgctgacgaggcagcacgcgccgttgttcgtccaggcgaagaagcttatcgccagattgtagctgcgttcggtccgggcattcttcgtgccgatggcgagatcgatcgcgccaaattgggtcgtatcgtgtttaacgacgaacaacaacgtaaggtgctgaatgcgattgtacaccctgcagtctataagaagatgctcgctgagaaagaagctcatatccgctcaggcgccaagacggttgtgctggatatcccgctgctgttcgaatccggattgtggcattgggtcgacaaagtgctcgtggtgtacgtcgatgatgatgttcagttacgccgccttatggcacgtaacgggtttaccgaagaagaagctctggcccgcattcgttcacagtggcccatggccgagaaagttaaacgtgcagacgctgtaatcgacaataatggcacgattgaagaaacccgccgccagctgctggccattttacaccagtgggatgcactgggtaagggtggctccggccaccatcatcaccatcac

SEQ ID NO: 202 - protein, 211 aa, synthetic construct
  REGION 1..211: note = Variant of 3'O-kinase
MAFTIGLTGGIAVGKSTVSAMMRELGLPVIDADEAARAVVRPGEEAYRQIVAAFGPGILRADGEIDRAKLGRIVFNDEQQRKVLNAIVHPAVYKKMLAEKEAHIRSGAKTVVLDIPLLFESGLWHWVDKVLVVYVDDDVQLRRLMARNGFTEEEALARIRSQWPMAEKVKRADAVIDNNGTIEETRRQLLAILHQWDALGKGGSGHHHHHH

SEQ ID NO: 203 - DNA, 633 bp, synthetic construct
  misc_feature 1..633: note = Variant of 3'O-kinase
  source 1..633: mol_type = other DNA
atggcgtttaccattggtttaacaggagggatcgcatcgggcaaatcgactgtgagtgccatgatgcgtgaactgggtctgccggtcatcgatgctgacgaggcagcccgcgaagtgatgcgtccaggcgaagaagcttatcgccagattgtagctgcgttcggtccgggcattcttcgtgccgatggcgagatcgatcgcgccaaattgggtgctatcgtgtttgctgacgaacaacaacgtaaggtgctgaatgcgattgtactgcctgcagtccgtaagaagatgctcgctgagaaagaagctcatatccgctcaggcgccaagacggttgtgctggatatcccgctgctgttcgaatccggattgtggcattgggtcgacaaagtgctcgtggtgtacgtcgatgatgatgttcagttacgccgccttatggcacgtaacgggtttaccgaagaagaagctctggcccgcattcgttcacagtggcccatggccgagaaagttaaacgtgcagacgctgtaatcgacaataatggcacgattgaagaaacccgccgccagctgctggccattttacaccagtgggatgcactgggtaagggtggctccggccaccatcatcaccatcac

SEQ ID NO: 204 - protein, 211 aa, synthetic construct
  REGION 1..211: note = Variant of 3'O-kinase
MAFTIGLTGGIASGKSTVSAMMRELGLPVIDADEAAREVMRPGEEAYRQIVAAFGPGILRADGEIDRAKLGAIVFADEQQRKVLNAIVLPAVRKKMLAEKEAHIRSGAKTVVLDIPLLFESGLWHWVDKVLVVYVDDDVQLRRLMARNGFTEEEALARIRSQWPMAEKVKRADAVIDNNGTIEETRRQLLAILHQWDALGKGGSGHHHHHH

SEQ ID NO: 205 - DNA, 633 bp, synthetic construct
  misc_feature 1..633: note = Variant of 3'O-kinase
  source 1..633: mol_type = other DNA
atggcgtttaccattggtttaacaggagggatcgcaagcggcaaatcgactgtgagtgccatgatgcgtgaactgggtctgccggtcatcgatgctgacgaggcagcacgcgccgttgttcgtccaggcgaagaagcttatcgccagattgtagctgcgttcggtccgggcattcttcgtgccgatggcgagatcgatcgcgccaaattgggtcgtatcaagtttaacgacgaacaacaacgtaaggtgctgaatgcgattgtactgcctgcagtctataagaagatgctcgctgagaaagaagctcatatccgctcaggcgccaagacggttgtgctggatatcccgctgctgttcgaatccggattggttcattgggtcgacaaagtgctcgtggtgtacgtcgatgatgatgttcagttacgccgccttatggcacgtaacgggtttaccgaagaagaagctctggcccgcattcgttcacagtggcccatggccgagaaagttaaacgtgcagacgctgtaatcgacaataatggcacgattgaagaaacccgccgccagctgctggccattttacaccagtgggatgcactgggtaagggtggctccggccaccatcatcaccatcac

SEQ ID NO: 206 - protein, 211 aa, synthetic construct
  REGION 1..211: note = Variant of 3'O-kinase
MAFTIGLTGGIASGKSTVSAMMRELGLPVIDADEAARAVVRPGEEAYRQIVAAFGPGILRADGEIDRAKLGRIKFNDEQQRKVLNAIVLPAVYKKMLAEKEAHIRSGAKTVVLDIPLLFESGLVHWVDKVLVVYVDDDVQLRRLMARNGFTEEEALARIRSQWPMAEKVKRADAVIDNNGTIEETRRQLLAILHQWDALGKGGSGHHHHHH

SEQ ID NO: 207 - DNA, 633 bp, synthetic construct
  misc_feature 1..633: note = Variant of 3'O-kinase
  source 1..633: mol_type = other DNA
atggcgtttaccattggtttaacaggagggatcgcagtaggcaaatcgactgtgagtgccatgatgcgtgaactgggtctgccggtcatcgatgctgacgaggcagcacgcgcagtggtgcgtccaggcgaagaagcttatcgccagattgtagctgcgttcggtccgggcattcttcgtgccgatggcgagatcgatcgcgccaaattgggtcgtatcaagtttaacgacgaacaacaacgtaaggtgctgaatgcgattgtactgcctgcagtctataagaagatgctcgctgagaaagaagctcatatccgctcaggcgccaagacggttgtgctggatatcccgctgctgttcgaatccggattgacccattgggtcgacaaagtgctcgtggtgtacgtcgatgatgatgttcagttacgccgccttatggcacgtaacgggtttaccgaagaagaagctctggcccgcattcgttcacagtggcccatggccgagaaagttaaacgtgcagacgctgtaatcgacaataatggcacgattgaagaaacccgccgccagctgctggccattttacaccagtgggatgcactgggtaagggtggctccggccaccatcatcaccatcac

SEQ ID NO: 208 - protein, 211 aa, synthetic construct
  REGION 1..211: note = Variant of 3'O-kinase
MAFTIGLTGGIAVGKSTVSAMMRELGLPVIDADEAARAVVRPGEEAYRQIVAAFGPGILRADGEIDRAKLGRIKFNDEQQRKVLNAIVLPAVYKKMLAEKEAHIRSGAKTVVLDIPLLFESGLTHWVDKVLVVYVDDDVQLRRLMARNGFTEEEALARIRSQWPMAEKVKRADAVIDNNGTIEETRRQLLAILHQWDALGKGGSGHHHHHH

SEQ ID NO: 209 - DNA, 633 bp, synthetic construct
  misc_feature 1..633: note = Variant of 3'O-kinase
  source 1..633: mol_type = other DNA
atggcgtttaccattggtttaacaggagggatcgcagtaggcaaatcgactgtgagtgccatgatgcgtgaactgggtctgccggtcatcgatgctgacgaggcagcacgcgccgttgttcgtccaggcgaagaagcttatcgccagattgtagctgcgttcggtccgggcattcttcgtgccgatggcgagatcgatcgcgccaaattgggtgctatcgtgtttgctgacgaacaacaacgtaaggtgctgaatgcgattgtactgcctgcagtctataagaagatgctcgctgagaaagaagctcatatccgctcaggcgccaagacggttgtgctggatatcccgctgctgttcgaatccggattgactcattgggtcgacaaagtgctcgtggtgtacgtcgatgatgatgttcagttacgccgccttatggcacgtaacgggtttaccgaagaagaagctatggcccgcattcgttcacagtggcccagtgccgagaaagttaaacgtgcagacgctgtaatcgacaataatggcacgattgaagaaacccgccgccagctgctggccattttacaccagtgggatgcactgggtaagggtggctccggccaccatcatcaccatcac

SEQ ID NO: 210 - protein, 211 aa, synthetic construct
  REGION 1..211: note = Variant of 3'O-kinase
MAFTIGLTGGIAVGKSTVSAMMRELGLPVIDADEAARAVVRPGEEAYRQIVAAFGPGILRADGEIDRAKLGAIVFADEQQRKVLNAIVLPAVYKKMLAEKEAHIRSGAKTVVLDIPLLFESGLTHWVDKVLVVYVDDDVQLRRLMARNGFTEEEAMARIRSQWPSAEKVKRADAVIDNNGTIEETRRQLLAILHQWDALGKGGSGHHHHHH

SEQ ID NO: 211 - DNA, 633 bp, synthetic construct
  misc_feature 1..633: note = Variant of 3'O-kinase
  source 1..633: mol_type = other DNA
atggcgtttaccattggtttaacaggagggatcgcatcgggcaaatcgactgtgagtgccatgatgcgtgaactgggtctgccggtcatcgatgctgacgaggcagcccgcgaagtggtgcgtccaggcgaagaagcttatcgccagattgtagctgcgttcggtccgggcattcttcgtgccgatggcgagatcgatcgcgccaaattgggtcgtatcgtgtttaacgacgaacaacaacgtaaggtgctgaatgcgattgtactgcctgcagtctataagaagatgctcgctgagaaagaagctcatatccgctcaggcgccaagacggttgtgctggatatcccgctgctgttcgaatccggattggttcattgggtcgacaaagtgctcgtggtgtacgtcgatgatgatgttcagttacgccgccttatggcacgtaacgggtttaccgaagaagaagctctggcccgcattcgttcacagtggcccatggccgagaaagttaaacgtgcagacgctgtaatcgacaataatggcacgattgaagaaacccgccgccagctgctggccattttacaccagtgggatgcactgggtaagggtggctccggccaccatcatcaccatcac

SEQ ID NO: 212 - protein, 211 aa, synthetic construct
  REGION 1..211: note = Variant of 3'O-kinase
MAFTIGLTGGIASGKSTVSAMMRELGLPVIDADEAAREVVRPGEEAYRQIVAAFGPGILRADGEIDRAKLGRIVFNDEQQRKVLNAIVLPAVYKKMLAEKEAHIRSGAKTVVLDIPLLFESGLVHWVDKVLVVYVDDDVQLRRLMARNGFTEEEALARIRSQWPMAEKVKRADAVIDNNGTIEETRRQLLAILHQWDALGKGGSGHHHHHH

SEQ ID NO: 213 - DNA, 633 bp, synthetic construct
  misc_feature 1..633: note = Variant of 3'O-kinase
  source 1..633: mol_type = other DNA
atggcgtttaccattggtttaacaggagggatcgcagtaggcaaatcgactgtgagtgccatgatgcgtgaactgggtctgccggtcatcgatgctgacgaggcagcacgcgccgttgttcgtccaggcgaagaagcttatcgccagattgtagctgcgttcggtccgggcattcttcgtgccgatggcgagatcgatcgcgccaaattgggtgctatcgtgtttgctgacgaacaacaacgtaaggtgctgaatgcgattgtaggtcctgcagtctataagaagatgctcgctgagaaagaagctcatatccgctcaggcgccaagacggttgtgctggatatcccgctgctgttcgaatccggattgtggcattgggtcgacaaagtgctcgtggtgtacgtcgatgatgatgttcagttacgccgccttatggcacgtaacgggtttaccgaagaagaagctctggcccgcattcgttcacagtggcccatggccgagaaagttaaacgtgcagacgctgtaatcgacaataatggcacgattgaagaaacccgccgccagctgctggccattttacaccagtgggatgcactgggtaagggtggctccggccaccatcatcaccatcac

SEQ ID NO: 214 - protein, 211 aa, synthetic construct
  REGION 1..211: note = Variant of 3'O-kinase
MAFTIGLTGGIAVGKSTVSAMMRELGLPVIDADEAARAVVRPGEEAYRQIVAAFGPGILRADGEIDRAKLGAIVFADEQQRKVLNAIVGPAVYKKMLAEKEAHIRSGAKTVVLDIPLLFESGLWHWVDKVLVVYVDDDVQLRRLMARNGFTEEEALARIRSQWPMAEKVKRADAVIDNNGTIEETRRQLLAILHQWDALGKGGSGHHHHHH

SEQ ID NO: 215 - DNA, 633 bp, synthetic construct
  misc_feature 1..633: note = Variant of 3'O-kinase
  source 1..633: mol_type = other DNA
atggcgtttaccattggtttaacaggagggatcgcagtaggcaaatcgactgtgagtgccatgatgcgtgaactgggtctgccggtcatcgatgctgacgaggcagcccgcgcagtgatgcgtccaggcgaagaagcttatcgccagattgtagctgcgttcggtccgggcattcttcgtgccgatggcgagatcgatcgcgccaaattgggtgctatcgtgtttaacgacgaacaacaacgtaaggtgctgaatgcgattgtacatcctgcagtccgcaagaagatgctcgctgagaaagaagctcatatccgctcaggcgccaagacggttgtgctggatatcccgctgctgttcgaatccggattgacccattgggtcgacaaagtgctcgtggtgtacgtcgatgatgatgttcagttacgccgccttatggcacgtaacgggtttaccgaagaagaagctctggcccgcattcgttcacagtggcccatggccgagaaagttaaacgtgcagacgctgtaatcgacaataatggcacgattgaagaaacccgccgccagctgctggccattttacaccagtgggatgcactgggtaagggtggctccggccaccatcatcaccatcac

SEQ ID NO: 216 - protein, 211 aa, synthetic construct
  REGION 1..211: note = Variant of 3'O-kinase
MAFTIGLTGGIAVGKSTVSAMMRELGLPVIDADEAARAVMRPGEEAYRQIVAAFGPGILRADGEIDRAKLGAIVFNDEQQRKVLNAIVHPAVRKKMLAEKEAHIRSGAKTVVLDIPLLFESGLTHWVDKVLVVYVDDDVQLRRLMARNGFTEEEALARIRSQWPMAEKVKRADAVIDNNGTIEETRRQLLAILHQWDALGKGGSGHHHHHH

SEQ ID NO: 217 - DNA, 633 bp, synthetic construct
  misc_feature 1..633: note = Variant of 3'O-kinase
  source 1..633: mol_type = other DNA
atggcgtttaccattggtttaacaggagggatcgcatcgggcaaatcgactgtgagtgccatgatgcgtgaactgggtctgccggtcatcgatgctgacgaggcagcccgcgccgttgttcgtccaggcgaagaagcttatcgccagattgtagctgcgttcggtccgggcattcttcgtgccgatggcgagatcgatcgcgccaaattgggtcgtatcaagtttaacgacgaacaacaacgtaaggtgctgaatgcgattgtaggtcctgcagtctataagaagatgctcgctgagaaagaagctcatatccgctcaggcgccaagacggttgtgctggatatcccgctgctgttcgaatccggattgacccattgggtcgacaaagtgctcgtggtgtacgtcgatgatgatgttcagttacgccgccttatggcacgtaacgggtttaccgaagaagaagctctggcccgcattcgttcacagtggcccatggccgagaaagttaaacgtgcagacgctgtaatcgacaataatggcacgattgaagaaacccgccgccagctgctggccattttacaccagtgggatgcactgggtaagggtggctccggccaccatcatcaccatcac

SEQ ID NO: 218 - protein, 211 aa, synthetic construct
  REGION 1..211: note = Variant of 3'O-kinase
MAFTIGLTGGIASGKSTVSAMMRELGLPVIDADEAARAVVRPGEEAYRQIVAAFGPGILRADGEIDRAKLGRIKFNDEQQRKVLNAIVGPAVYKKMLAEKEAHIRSGAKTVVLDIPLLFESGLTHWVDKVLVVYVDDDVQLRRLMARNGFTEEEALARIRSQWPMAEKVKRADAVIDNNGTIEETRRQLLAILHQWDALGKGGSGHHHHHH

SEQ ID NO: 219 - DNA, 633 bp, synthetic construct
  misc_feature 1..633: note = Variant of 3'O-kinase
  source 1..633: mol_type = other DNA
atggcgtttaccattggtttaacaggagggatcgcagtaggcaaatcgactgtgagtgccatgatgcgtgaactgggtctgccggtcatcgatgctgacgaggcaacccgcgaactgatgcgtccaggcgaagaagcttatcgccagattgtagctgcgttcggtccgggcattcttcgtgccgatggcgagatcgatcgcgccaaattgggtgctatcgtgtttaacgacgaacaacaacgtaaggtgctgaatgcgattgtactgcctgcagtccgcaagaagatgctcgctgagaaagaagctcatatccgctcaggcgccaagacggttgtgctggatatcccgctgctgttcgaatccggattgactcattgggtcgacaaagtgctcgtggtgtacgtcgatgatgatgttcagttacgccgccttatggcacgtaacgggtttaccgaagaagaagctctggcccgcattcgttcacagtggcccatggccgagaaagttaaacgtgcagacgctgtaatcgacaataatggcacgattgaagaaacccgccgccagctgctggccattttacaccagtgggatgcactgggtaagggtggctccggccaccatcatcaccatcac

SEQ ID NO: 220 - protein, 211 aa, synthetic construct
  REGION 1..211: note = Variant of 3'O-kinase
MAFTIGLTGGIAVGKSTVSAMMRELGLPVIDADEATRELMRPGEEAYRQIVAAFGPGILRADGEIDRAKLGAIVFNDEQQRKVLNAIVLPAVRKKMLAEKEAHIRSGAKTVVLDIPLLFESGLTHWVDKVLVVYVDDDVQLRRLMARNGFTEEEALARIRSQWPMAEKVKRADAVIDNNGTIEETRRQLLAILHQWDALGKGGSGHHHHHH

SEQ ID NO: 221 - DNA, 633 bp, synthetic construct
  misc_feature 1..633: note = Variant of 3'O-kinase
  source 1..633: mol_type = other DNA
atggcgtttaccattggtttaacaggagggatcgcatcgggcaaatcgactgtgagtgccatgatgcgtgaactgggtctgccggtcatcgatgctgacgaggcagcccgcgcactgatgcgtccaggcgaagaagcttatcgccagattgtagctgcgttcggtccgggcattcttcgtgccgatggcgagatcgatcgcgccaaattgggtcgtatcgtgtttgctgacgaacaacaacgtaaggtgctgaatgcgattgtacaccctgcagtccgtaagaagatgctcgctgagaaagaagctcatatccgctcaggcgccaagacggttgtgctggatatcccgctgctgttcgaatccggattgacccattgggtcgacaaagtgctcgtggtgtacgtcgatgatgatgttcagttacgccgccttatggcacgtaacgggtttaccgaagaagaagctctggcccgcattcgttcacagtggcccatggccgagaaagttaaacgtgcagacgctgtaatcgacaataatggcacgattgaagaaacccgccgccagctgctggccattttacaccagtgggatgcactgggtaagggtggctccggccaccatcatcaccatcac

SEQ ID NO: 222 - protein, 211 aa, synthetic construct
  REGION 1..211: note = Variant of 3'O-kinase
MAFTIGLTGGIASGKSTVSAMMRELGLPVIDADEAARALMRPGEEAYRQIVAAFGPGILRADGEIDRAKLGRIVFADEQQRKVLNAIVHPAVRKKMLAEKEAHIRSGAKTVVLDIPLLFESGLTHWVDKVLVVYVDDDVQLRRLMARNGFTEEEALARIRSQWPMAEKVKRADAVIDNNGTIEETRRQLLAILHQWDALGKGGSGHHHHHH

SEQ ID NO: 223 - DNA, 633 bp, synthetic construct
  misc_feature 1..633: note = Variant of 3'O-kinase
  source 1..633: mol_type = other DNA
atggcgtttaccattggtttaacaggagggatcgcatcgggcaaatcgactgtgagtgccatgatgcgtgaactgggtctgccggtcatcgatgctgacgaggcagcacgcgccgttgttcgtccaggcgaagaagcttatcgccagattgtagctgcgttcggtccgggcattcttcgtgccgatggcgagatcgatcgcgccaaattgggtgctatcaagtttaacgacgaacaacaacgtaaggtgctgaatgcgattgtactgcctgcagtccgtaagaagatgctcgctgagaaagaagctcatatccgctcaggcgccaagacggttgtgctggatatcccgctgctgttcgaatccggattgtggcattgggtcgacaaagtgctcgtggtgtacgtcgatgatgatgttcagttacgccgccttatggcacgtaacgggtttaccgaagaagaagctctggcccgcattcgttcacagtggcccatggccgagaaagttaaacgtgcagacgctgtaatcgacaataatggcacgattgaagaaacccgccgccagctgctggccattttacaccagtgggatgcactgggtaagggtggctccggccaccatcatcaccatcac

SEQ ID NO: 224 - protein, 211 aa, synthetic construct
  REGION 1..211: note = Variant of 3'O-kinase
MAFTIGLTGGIASGKSTVSAMMRELGLPVIDADEAARAVVRPGEEAYRQIVAAFGPGILRADGEIDRAKLGAIKFNDEQQRKVLNAIVLPAVRKKMLAEKEAHIRSGAKTVVLDIPLLFESGLWHWVDKVLVVYVDDDVQLRRLMARNGFTEEEALARIRSQWPMAEKVKRADAVIDNNGTIEETRRQLLAILHQWDALGKGGSGHHHHHH

SEQ ID NO: 225 - DNA, 633 bp, synthetic construct
  misc_feature 1..633: note = Variant of 3'O-kinase
  source 1..633: mol_type = other DNA
atggcgtttaccattggtttaacaggagggatcgcatcgggcaaatcgactgtgagtgccatgatgcgtgaactgggtctgccggtcatcgatgctgacgaggcaacccgcgaactgatgcgtccaggcgaagaagcttatcgccagattgtagctgcgttcggtccgggcattcttcgtgccgatggcgagatcgatcgcgccaaattgggtcgtatcaagtttaacgacgaacaacaacgtaaggtgctgaatgcgattgtactgcctgcagtccgtaagaagatgctcgctgagaaagaagctcatatccgctcaggcgccaagacggttgtgctggatatcccgctgctgttcgaatccggattgactcattgggtcgacaaagtgctcgtggtgtacgtcgatgatgatgttcagttacgccgccttatggcacgtaacgggtttaccgaagaagaagctctggcccgcattcgttcacagtggcccatggccgagaaagttaaacgtgcagacgctgtaatcgacaataatggcacgattgaagaaacccgccgccagctgctggccattttacaccagtgggatgcactgggtaagggtggctccggccaccatcatcaccatcac

SEQ ID NO: 226 - protein, 211 aa, synthetic construct
  REGION 1..211: note = Variant of 3'O-kinase
MAFTIGLTGGIASGKSTVSAMMRELGLPVIDADEATRELMRPGEEAYRQIVAAFGPGILRADGEIDRAKLGRIKFNDEQQRKVLNAIVLPAVRKKMLAEKEAHIRSGAKTVVLDIPLLFESGLTHWVDKVLVVYVDDDVQLRRLMARNGFTEEEALARIRSQWPMAEKVKRADAVIDNNGTIEETRRQLLAILHQWDALGKGGSGHHHHHH

SEQ ID NO: 227 - DNA, 633 bp, synthetic construct
  misc_feature 1..633: note = Variant of 3'O-kinase
  source 1..633: mol_type = other DNA
atggcgtttaccattggtttaacaggagggatcgcagtaggcaaatcgactgtgagtgccatgatgcgtgaactgggtctgccggtcatcgatgctgacgaggcaacccgcgaagtgatgcgtccaggcgaagaagcttatcgccagattgtagctgcgttcggtccgggcattcttcgtgccgatggcgagatcgatcgcgccaaattgggtgctatcaagtttgctgacgaacaacaacgtaaggtgctgaatgcgattgtacatcctgcagtccgcaagaagatgctcgctgagaaagaagctcatatccgctcaggcgccaagacggttgtgctggatatcccgctgctgttcgaatccggattgacccattgggtcgacaaagtgctcgtggtgtacgtcgatgatgatgttcagttacgccgccttatggcacgtaacgggtttaccgaagaagaagctctggcccgcattcgttcacagtggcccatggccgagaaagttaaacgtgcagacgctgtaatcgacaataatggcacgattgaagaaacccgccgccagctgctggccattttacaccagtgggatgcactgggtaagggtggctccggccaccatcatcaccatcac

SEQ ID NO: 228 - protein, 211 aa, synthetic construct
  REGION 1..211: note = Variant of 3'O-kinase
MAFTIGLTGGIAVGKSTVSAMMRELGLPVIDADEATREVMRPGEEAYRQIVAAFGPGILRADGEIDRAKLGAIKFADEQQRKVLNAIVHPAVRKKMLAEKEAHIRSGAKTVVLDIPLLFESGLTHWVDKVLVVYVDDDVQLRRLMARNGFTEEEALARIRSQWPMAEKVKRADAVIDNNGTIEETRRQLLAILHQWDALGKGGSGHHHHHH

SEQ ID NO: 229 - DNA, 633 bp, synthetic construct
  misc_feature 1..633: note = Variant of 3'O-kinase
  source 1..633: mol_type = other DNA
atggcgtttaccattggtttaacaggagggatcgcatcgggcaaatcgactgtgagtgccatgatgcgtgaactgggtctgccggtcatcgatgctgacgaggcagcccgcgaagtgatgcgtccaggcgaagaagcttatcgccagattgtagctgcgttcggtccgggcattcttcgtgccgatggcgagatcgatcgcgccaaattgggtgctatcgtgtttaacgacgaacaacaacgtaaggtgctgaatgcgattgtacaccctgcagtctataagaagatgctcgctgagaaagaagctcatatccgctcaggcgccaagacggttgtgctggatatcccgctgctgttcgaatccggattgacccattgggtcgacaaagtgctcgtggtgtacgtcgatgatgatgttcagttacgccgccttatggcacgtaacgggtttaccgaagaagaagctctggcccgcattcgttcacagtggcccatggccgagaaagttaaacgtgcagacgctgtaatcgacaataatggcacgattgaagaaacccgccgccagctgctggccattttacaccagtgggatgcactgggtaagggtggctccggccaccatcatcaccatcac

SEQ ID NO: 230 - protein, 211 aa, synthetic construct
  REGION 1..211: note = Variant of 3'O-kinase
MAFTIGLTGGIASGKSTVSAMMRELGLPVIDADEAAREVMRPGEEAYRQIVAAFGPGILRADGEIDRAKLGAIVFNDEQQRKVLNAIVHPAVYKKMLAEKEAHIRSGAKTVVLDIPLLFESGLTHWVDKVLVVYVDDDVQLRRLMARNGFTEEEALARIRSQWPMAEKVKRADAVIDNNGTIEETRRQLLAILHQWDALGKGGSGHHHHHH

SEQ ID NO: 231 - DNA, 633 bp, synthetic construct
  misc_feature 1..633: note = Variant of 3'O-kinase
  source 1..633: mol_type = other DNA
atggcgtttaccattggtttaacaggagggatcgcagtaggcaaatcgactgtgagtgccatgatgcgtgaactgggtctgccggtcatcgatgctgacgaggcagcacgcgccgttgttcgtccaggcgaagaagcttatcgccagattgtagctgcgttcggtccgggcattcttcgtgccgatggcgagatcgatcgcgccaaattgggtgctatcgtgtttaacgacgaacaacaacgtaaggtgctgaatgcgattgtactgcctgcagtccgtaagaagatgctcgctgagaaagaagctcatatccgctcaggcgccaagacggttgtgctggatatcccgctgctgttcgaatccggattgacccattgggtcgacaaagtgctcgtggtgtacgtcgatgatgatgttcagttacgccgccttatggcacgtaacgggtttaccgaagaagaagctctggcccgcattcgttcacagtggcccatggccgagaaagttaaacgtgcagacgctgtaatcgacaataatggcacgattgaagaaacccgccgccagctgctggccattttacaccagtgggatgcactgggtaagggtggctccggccaccatcatcaccatcac

SEQ ID NO: 232 - protein, 211 aa, synthetic construct
  REGION 1..211: note = Variant of 3'O-kinase
MAFTIGLTGGIAVGKSTVSAMMRELGLPVIDADEAARAVVRPGEEAYRQIVAAFGPGILRADGEIDRAKLGAIVFNDEQQRKVLNAIVLPAVRKKMLAEKEAHIRSGAKTVVLDIPLLFESGLTHWVDKVLVVYVDDDVQLRRLMARNGFTEEEALARIRSQWPMAEKVKRADAVIDNNGTIEETRRQLLAILHQWDALGKGGSGHHHHHH

SEQ ID NO: 233 - DNA, 633 bp, synthetic construct
  misc_feature 1..633: note = Variant of 3'O-kinase
  source 1..633: mol_type = other DNA
atggcgtttaccattggtttaacaggagggatcgcagcgggcaaatcgactgtgagtgccatgatgcgtgaactgggtctgccggtcatcgatgctgacgaggcagcacgcgccgttgttcgtccaggcgaagaagcttatcgccagattgtagctgcgttcggtccgggcattcttcgtgccgatggcgagatcgatcgcgccaaattgggtgctatcgtgtttaacgacgaacaacaacgtaaggtgctgaatgcgattgtactgcctgcagtccgtaagaagatgctcgctgagaaagaagctcatatccgctcaggcgccaagacggttgtgctggatatcccgctgctgttcgaatccggattggttcattgggtcgacaaagtgctcgtggtgtacgtcgatgatgatgttcagttacgccgccttatggcacgtaacgggtttaccgaagaagaagctctggcccgcattcgttcacagtggcccatggccgagaaagttaaacgtgcagacgctgtaatcgacaataatggcacgattgaagaaacccgccgccagctgctggccattttacaccagtgggatgcactgggtaagggtggctccggccaccatcatcaccatcac

SEQ ID NO: 234 - protein, 211 aa, synthetic construct
  REGION 1..211: note = Variant of 3'O-kinase
MAFTIGLTGGIAAGKSTVSAMMRELGLPVIDADEAARAVVRPGEEAYRQIVAAFGPGILRADGEIDRAKLGAIVFNDEQQRKVLNAIVLPAVRKKMLAEKEAHIRSGAKTVVLDIPLLFESGLVHWVDKVLVVYVDDDVQLRRLMARNGFTEEEALARIRSQWPMAEKVKRADAVIDNNGTIEETRRQLLAILHQWDALGKGGSGHHHHHH

SEQ ID NO: 235 - DNA, 633 bp, synthetic construct
  misc_feature 1..633: note = Variant of 3'O-kinase
  source 1..633: mol_type = other DNA
atggcgtttaccattggtttaacaggagggatcgcagtaggcaaatcgactgtgagtgccatgatgcgtgaactgggtctgccggtcatcgatgctgacgaggcagcacgcgccgttgttcgtccaggcgaagaagcttatcgccagattgtagctgcgttcggtccgggcattcttcgtgccgatggcgagatcgatcgcgccaaattgggtcgtatcgtgtttgctgacgaacaacaacgtaaggtgctgaatgcgattgtacaccctgcagtccgtaagaagatgctcgctgagaaagaagctcatatccgctcaggcgccaagacggttgtgctggatatcccgctgctgttcgaatccggattgacccattgggtcgacaaagtgctcgtggtgtacgtcgatgatgatgttcagttacgccgccttatggcacgtaacgggtttaccgaagaagaagctctggcccgcattcgttcacagtggcccatggccgagaaagttaaacgtgcagacgctgtaatcgacaataatggcacgattgaagaaacccgccgccagctgctggccattttacaccagtgggatgcactgggtaagggtggctccggccaccatcatcaccatcac

SEQ ID NO: 236 - protein, 211 aa, synthetic construct
  REGION 1..211: note = Variant of 3'O-kinase
MAFTIGLTGGIAVGKSTVSAMMRELGLPVIDADEAARAVVRPGEEAYRQIVAAFGPGILRADGEIDRAKLGRIVFADEQQRKVLNAIVHPAVRKKMLAEKEAHIRSGAKTVVLDIPLLFESGLTHWVDKVLVVYVDDDVQLRRLMARNGFTEEEALARIRSQWPMAEKVKRADAVIDNNGTIEETRRQLLAILHQWDALGKGGSGHHHHHH

SEQ ID NO: 237 - DNA, 633 bp, synthetic construct
  misc_feature 1..633: note = Variant of 3'O-kinase
  source 1..633: mol_type = other DNA
atggcgtttaccattggtttaacaggagggatcgcagtaggcaaatcgactgtgagtgccatgatgcgtgaactgggtctgccggtcatcgatgctgacgaggcagcccgcgccgttgttcgtccaggcgaagaagcttatcgccagattgtagctgcgttcggtccgggcattcttcgtgccgatggcgagatcgatcgcgccaaattgggtgctatcgtgtttgctgacgaacaacaacgtaaggtgctgaatgcgattgtaagtcctgcagtctataagaagatgctcgctgagaaagaagctcatatccgctcaggcgccaagacggttgtgctggatatcccgctgctgttcgaatccggattgacccattgggtcgacaaagtgctcgtggtgtacgtcgatgatgatgttcagttacgccgccttatggcacgtaacgggtttaccgaagaagaagctctggcccgcattcgttcacagtggcccatggccgagaaagttaaacgtgcagacgctgtaatcgacaataatggcacgattgaagaaacccgccgccagctgctggccattttacaccagtgggatgcactgggtaagggtggctccggccaccatcatcaccatcac

SEQ ID NO: 238 - protein, 211 aa, synthetic construct
  REGION 1..211: note = Variant of 3'O-kinase
MAFTIGLTGGIAVGKSTVSAMMRELGLPVIDADEAARAVVRPGEEAYRQIVAAFGPGILRADGEIDRAKLGAIVFADEQQRKVLNAIVSPAVYKKMLAEKEAHIRSGAKTVVLDIPLLFESGLTHWVDKVLVVYVDDDVQLRRLMARNGFTEEEALARIRSQWPMAEKVKRADAVIDNNGTIEETRRQLLAILHQWDALGKGGSGHHHHHH

SEQ ID NO: 239 - DNA, 633 bp, synthetic construct
  misc_feature 1..633: note = Variant of 3'O-kinase
  source 1..633: mol_type = other DNA
atggcgtttaccattggtttaacaggagggatcgcatcgggcaaatcgactgtgagtgccatgatgcgtgaactgggtctgccggtcatcgatgctgacgaggcaacccgcgcactgatgcgtccaggcgaagaagcttatcgccagattgtagctgcgttcggtccgggcattcttcgtgccgatggcgagatcgatcgcgccaaattgggtcgtatcgtgtttgctgacgaacaacaacgtaaggtgctgaatgcgattgtactgcctgcagtctataagaagatgctcgctgagaaagaagctcatatccgctcaggcgccaagacggttgtgctggatatcccgctgctgttcgaatccggattgacccattgggtcgacaaagtgctcgtggtgtacgtcgatgatgatgttcagttacgccgccttatggcacgtaacgggtttaccgaagaagaagctctggcccgcattcgttcacagtggcccatggccgagaaagttaaacgtgcagacgctgtaatcgacaataatggcacgattgaagaaacccgccgccagctgctggccattttacaccagtgggatgcactgggtaagggtggctccggccaccatcatcaccatcac

SEQ ID NO: 240 - protein, 211 aa, synthetic construct
  REGION 1..211: note = Variant of 3'O-kinase
MAFTIGLTGGIASGKSTVSAMMRELGLPVIDADEATRALMRPGEEAYRQIVAAFGPGILRADGEIDRAKLGRIVFADEQQRKVLNAIVLPAVYKKMLAEKEAHIRSGAKTVVLDIPLLFESGLTHWVDKVLVVYVDDDVQLRRLMARNGFTEEEALARIRSQWPMAEKVKRADAVIDNNGTIEETRRQLLAILHQWDALGKGGSGHHHHHH

SEQ ID NO: 241 - DNA, 633 bp, synthetic construct
  misc_feature 1..633: note = Variant of 3'O-kinase
  source 1..633: mol_type = other DNA
atggcgtttaccattggtttaacaggagggatcgcagtgggcaaatcgactgtgagtgccatgatgcgtgaactgggtctgccggtcatcgatgctgacgaggcagcccgcgccgttgttcgtccaggcgaagaagcttatcgccagattgtagctgcgttcggtccgggcattcttcgtgccgatggcgagatcgatcgcgccaaattgggtgctatcgtgtttgctgacgaacaacaacgtaaggtgctgaatgcgattgtacaccctgcagtctataagaagatgctcgctgagaaagaagctcatatccgctcaggcgccaagacggttgtgctggatatcccgctgctgttcgaatccggattgacccattgggtcgacaaagtgctcgtggtgtacgtcgatgatgatgttcagttacgccgccttatggcacgtaacgggtttaccgaagaagaagctctggcccgcattcgttcacagtggcccatggccgagaaagttaaacgtgcagacgctgtaatcgacaataatggcacgattgaagaaacccgccgccagctgctggccattttacaccagtgggatgcactgggtaagggtggctccggccaccatcatcaccatcac

SEQ ID NO: 242 - protein, 211 aa, synthetic construct
  REGION 1..211: note = Variant of 3'O-kinase
MAFTIGLTGGIAVGKSTVSAMMRELGLPVIDADEAARAVVRPGEEAYRQIVAAFGPGILRADGEIDRAKLGAIVFADEQQRKVLNAIVHPAVYKKMLAEKEAHIRSGAKTVVLDIPLLFESGLTHWVDKVLVVYVDDDVQLRRLMARNGFTEEEALARIRSQWPMAEKVKRADAVIDNNGTIEETRRQLLAILHQWDALGKGGSGHHHHHH

SEQ ID NO: 243 - DNA, 633 bp, synthetic construct
  misc_feature 1..633: note = Variant of 3'O-kinase
  source 1..633: mol_type = other DNA
atggcgtttaccattggtttaacaggagggatcgcagtaggcaaatcgactgtgagtgccatgatgcgtgaactgggtctgccggtcatcgatgctgacgaggcagcacgcgccgttgttcgtccaggcgaagaagcttatcgccagattgtagctgcgttcggtccgggcattcttcgtgccgatggcgagatcgatcgcgccaaattgggtgctatcgtgtttgctgacgaacaacaacgtaaggtgctgaatgcgattgtacaccctgcagtctataagaagatgctcgctgagaaagaagctcatatccgctcaggcgccaagacggttgtgctggatatcccgctgctgttcgaatccggattggttcattgggtcgacaaagtgctcgtggtgtacgtcgatgatgatgttcagttacgccgccttatggcacgtaacgggtttaccgaagaagaagctctggcccgcattcgttcacagtggcccatggccgagaaagttaaacgtgcagacgctgtaatcgacaataatggcacgattgaagaaacccgccgccagctgctggccattttacaccagtgggatgcactgggtaagggtggctccggccaccatcatcaccatcac

SEQ ID NO: 244 - protein, 211 aa, synthetic construct
  REGION 1..211: note = Variant of 3'O-kinase
MAFTIGLTGGIAVGKSTVSAMMRELGLPVIDADEAARAVVRPGEEAYRQIVAAFGPGILRADGEIDRAKLGAIVFADEQQRKVLNAIVHPAVYKKMLAEKEAHIRSGAKTVVLDIPLLFESGLVHWVDKVLVVYVDDDVQLRRLMARNGFTEEEALARIRSQWPMAEKVKRADAVIDNNGTIEETRRQLLAILHQWDALGKGGSGHHHHHH

SEQ ID NO: 245 - DNA, 633 bp, synthetic construct
  misc_feature 1..633: note = Variant of 3'O-kinase
  source 1..633: mol_type = other DNA
atggcgtttaccattggtttaacaggagggatcgcatcgggcaaatcgactgtgagtgccatgatgcgtgaactgggtctgccggtcatcgatgctgacgaggcaacccgcgaactgatgcgtccaggcgaagaagcttatcgccagattgtagctgcgttcggtccgggcattcttcgtgccgatggcgagatcgatcgcgccaaattgggtcgtatcaagtttgctgacgaacaacaacgtaaggtgctgaatgcgattgtacatcctgcagtccgcaagaagatgctcgctgagaaagaagctcatatccgctcaggcgccaagacggttgtgctggatatcccgctgctgttcgaatccggattgtggcattgggtcgacaaagtgctcgtggtgtacgtcgatgatgatgttcagttacgccgccttatggcacgtaacgggtttaccgaagaagaagctctggcccgcattcgttcacagtggcccatggccgagaaagttaaacgtgcagacgctgtaatcgacaataatggcacgattgaagaaacccgccgccagctgctggccattttacaccagtgggatgcactgggtaagggtggctccggccaccatcatcaccatcac

SEQ ID NO: 246 - protein, 211 aa, synthetic construct
  REGION 1..211: note = Variant of 3'O-kinase
MAFTIGLTGGIASGKSTVSAMMRELGLPVIDADEATRELMRPGEEAYRQIVAAFGPGILRADGEIDRAKLGRIKFADEQQRKVLNAIVHPAVRKKMLAEKEAHIRSGAKTVVLDIPLLFESGLWHWVDKVLVVYVDDDVQLRRLMARNGFTEEEALARIRSQWPMAEKVKRADAVIDNNGTIEETRRQLLAILHQWDALGKGGSGHHHHHH

SEQ ID NO: 247 - DNA, 633 bp, synthetic construct
  misc_feature 1..633: note = Variant of 3'O-kinase
  source 1..633: mol_type = other DNA
atggcgtttaccattggtttaacaggagggatcgcagtaggcaaatcgactgtgagtgccatgatgcgtgaactgggtctgccggtcatcgatgctgacgaggcaacccgcgcactgatgcgtccaggcgaagaagcttatcgccagattgtagctgcgttcggtccgggcattcttcgtgccgatggcgagatcgatcgcgccaaattgggtcgtatcgtgtttgctgacgaacaacaacgtaaggtgctgaatgcgattgtactgcctgcagtccgtaagaagatgctcgctgagaaagaagctcatatccgctcaggcgccaagacggttgtgctggatatcccgctgctgttcgaatccggattggttcattgggtcgacaaagtgctcgtggtgtacgtcgatgatgatgttcagttacgccgccttatggcacgtaacgggtttaccgaagaagaagctctggcccgcattcgttcacagtggcccatggccgagaaagttaaacgtgcagacgctgtaatcgacaataatggcacgattgaagaaacccgccgccagctgctggccattttacaccagtgggatgcactgggtaagggtggctccggccaccatcatcaccatcac

SEQ ID NO: 248 - protein, 211 aa, synthetic construct
  REGION 1..211: note = Variant of 3'O-kinase
MAFTIGLTGGIAVGKSTVSAMMRELGLPVIDADEATRALMRPGEEAYRQIVAAFGPGILRADGEIDRAKLGRIVFADEQQRKVLNAIVLPAVRKKMLAEKEAHIRSGAKTVVLDIPLLFESGLVHWVDKVLVVYVDDDVQLRRLMARNGFTEEEALARIRSQWPMAEKVKRADAVIDNNGTIEETRRQLLAILHQWDALGKGGSGHHHHHH

SEQ ID NO: 249 - DNA, 633 bp, synthetic construct
  misc_feature 1..633: note = Variant of 3'O-kinase
  source 1..633: mol_type = other DNA
atggcgtttaccattggtttaacaggagggatcgcagtaggcaaatcgactgtgagtgccatgatgcgtgaactgggtctgccggtcatcgatgctgacgaggcagcacgcgccgttgttcgtccaggcgaagaagcttatcgccagattgtagctgcgttcggtccgggcattcttcgtgccgatggcgagatcgatcgcgccaaattgggtgctatcgtgtttgctgacgaacaacaacgtaaggtgctgaatgcgattgtactgcctgcagtccgtaagaagatgctcgctgagaaagaagctcatatccgctcaggcgccaagacggttgtgctggatatcccgctgctgttcgaatccggattgtggcattgggtcgacaaagtgctcgtggtgtacgtcgatgatgatgttcagttacgccgccttatggcacgtaacgggtttaccgaagaagaagctatggcccgcattcgttcacagtggcccatggccgagaaagttaaacgtgcagacgctgtaatcgacaataatggcacgattgaagaaacccgccgccagctgctggccattttacaccagtgggatgcactgggtaagggtggctccggccaccatcatcaccatcac

SEQ ID NO: 250 - protein, 211 aa, synthetic construct
  REGION 1..211: note = Variant of 3'O-kinase
MAFTIGLTGGIAVGKSTVSAMMRELGLPVIDADEAARAVVRPGEEAYRQIVAAFGPGILRADGEIDRAKLGAIVFADEQQRKVLNAIVLPAVRKKMLAEKEAHIRSGAKTVVLDIPLLFESGLWHWVDKVLVVYVDDDVQLRRLMARNGFTEEEAMARIRSQWPMAEKVKRADAVIDNNGTIEETRRQLLAILHQWDALGKGGSGHHHHHH

SEQ ID NO: 251 - DNA, 633 bp, synthetic construct
  misc_feature 1..633: note = Variant of 3'O-kinase
  source 1..633: mol_type = other DNA
atggcgtttaccattggtttaacaggagggatcgcagcgggcaaatcgactgtgagtgccatgatgcgtgaactgggtctgccggtcatcgatgctgacgaggcagcacgcgccgttgttcgtccaggcgaagaagcttatcgccagattgtagctgcgttcggtccgggcattcttcgtgccgatggcgagatcgatcgcgccaaattgggtcgtatcgtgtttaacgacgaacaacaacgtaaggtgctgaatgcgattgtaggtcctgcagtccgtaagaagatgctcgctgagaaagaagctcatatccgctcaggcgccaagacggttgtgctggatatcccgctgctgttcgaatccggattgacccattgggtcgacaaagtgctcgtggtgtacgtcgatgatgatgttcagttacgccgccttatggcacgtaacgggtttaccgaagaagaagctctggcccgcattcgttcacagtggcccatggccgagaaagttaaacgtgcagacgctgtaatcgacaataatggcacgattgaagaaacccgccgccagctgctggccattttacaccagtgggatgcactgggtaagggtggctccggccaccatcatcaccatcac

SEQ ID NO: 252 - protein, 211 aa, synthetic construct
  REGION 1..211: note = Variant of 3'O-kinase
MAFTIGLTGGIAAGKSTVSAMMRELGLPVIDADEAARAVVRPGEEAYRQIVAAFGPGILRADGEIDRAKLGRIVFNDEQQRKVLNAIVGPAVRKKMLAEKEAHIRSGAKTVVLDIPLLFESGLTHWVDKVLVVYVDDDVQLRRLMARNGFTEEEALARIRSQWPMAEKVKRADAVIDNNGTIEETRRQLLAILHQWDALGKGGSGHHHHHH

SEQ ID NO: 253 - DNA, 633 bp, synthetic construct
  misc_feature 1..633: note = Variant of 3'O-kinase
  source 1..633: mol_type = other DNA
atggcgtttaccattggtttaacaggagggatcgcagtaggcaaatcgactgtgagtgccatgatgcgtgaactgggtctgccggtcatcgatgctgacgaggcagcacgcgccgttgttcgtccaggcgaagaagcttatcgccagattgtagctgcgttcggtccgggcattcttcgtgccgatggcgagatcgatcgcgccaaattgggtgctatcaagtttaacgacgaacaacaacgtaaggtgctgaatgcgattgtactgcctgcagtctataagaagatgctcgctgagaaagaagctcatatccgctcaggcgccaagacggttgtgctggatatcccgctgctgttcgaatccggattggttcattgggtcgacaaagtgctcgtggtgtacgtcgatgatgatgttcagttacgccgccttatggcacgtaacgggtttaccgaagaagaagctctggcccgcattcgttcacagtggcccatggccgagaaagttaaacgtgcagacgctgtaatcgacaataatggcacgattgaagaaacccgccgccagctgctggccattttacaccagtgggatgcactgggtaagggtggctccggccaccatcatcaccatcac

SEQ ID NO: 254 - protein, 211 aa, synthetic construct
  REGION 1..211: note = Variant of 3'O-kinase
MAFTIGLTGGIAVGKSTVSAMMRELGLPVIDADEAARAVVRPGEEAYRQIVAAFGPGILRADGEIDRAKLGAIKFNDEQQRKVLNAIVLPAVYKKMLAEKEAHIRSGAKTVVLDIPLLFESGLVHWVDKVLVVYVDDDVQLRRLMARNGFTEEEALARIRSQWPMAEKVKRADAVIDNNGTIEETRRQLLAILHQWDALGKGGSGHHHHHH

SEQ ID NO: 255 - DNA, 633 bp, synthetic construct
  misc_feature 1..633: note = Variant of 3'O-kinase
  source 1..633: mol_type = other DNA
atggcgtttaccattggtttaacaggagggatcgcatcgggcaaatcgactgtgagtgccatgatgcgtgaactgggtctgccggtcatcgatgctgacgaggcagcacgcgccgttgttcgtccaggcgaagaagcttatcgccagattgtagctgcgttcggtccgggcattcttcgtgccgatggcgagatcgatcgcgccaaattgggtgctatcaagtttaacgacgaacaacaacgtaaggtgctgaatgcgattgtaagtcctgcagtctataagaagatgctcgctgagaaagaagctcatatccgctcaggcgccaagacggttgtgctggatatcccgctgctgttcgaatccggattgacccattgggtcgacaaagtgctcgtggtgtacgtcgatgatgatgttcagttacgccgccttatggcacgtaacgggtttaccgaagaagaagctctggcccgcattcgttcacagtggcccatggccgagaaagttaaacgtgcagacgctgtaatcgacaataatggcacgattgaagaaacccgccgccagctgctggccattttacaccagtgggatgcactgggtaagggtggctccggccaccatcatcaccatcac

SEQ ID NO: 256 - protein, 211 aa, synthetic construct
  REGION 1..211: note = Variant of 3'O-kinase
MAFTIGLTGGIASGKSTVSAMMRELGLPVIDADEAARAVVRPGEEAYRQIVAAFGPGILRADGEIDRAKLGAIKFNDEQQRKVLNAIVSPAVYKKMLAEKEAHIRSGAKTVVLDIPLLFESGLTHWVDKVLVVYVDDDVQLRRLMARNGFTEEEALARIRSQWPMAEKVKRADAVIDNNGTIEETRRQLLAILHQWDALGKGGSGHHHHHH

SEQ ID NO: 257 - DNA, 633 bp, synthetic construct
  misc_feature 1..633: note = Variant of 3'O-kinase
  source 1..633: mol_type = other DNA
atggcgtttaccattggtttaacaggagggatcgcatcgggcaaatcgactgtgagtgccatgatgcgtgaactgggtctgccggtcatcgatgctgacgaggcagcacgcgccgttgttcgtccaggcgaagaagcttatcgccagattgtagctgcgttcggtccgggcattcttcgtgccgatggcgagatcgatcgcgccaaattgggtcgtatcgtgtttaacgacgaacaacaacgtaaggtgctgaatgcgattgtacaccctgcagtctataagaagatgctcgctgagaaagaagctcatatccgctcaggcgccaagacggttgtgctggatatcccgctgctgttcgaatccggattggttcattgggtcgacaaagtgctcgtggtgtacgtcgatgatgatgttcagttacgccgccttatggcacgtaacgggtttaccgaagaagaagctctggcccgcattcgttcacagtggcccatggccgagaaagttaaacgtgcagacgctgtaatcgacaataatggcacgattgaagaaacccgccgccagctgctggccattttacaccagtgggatgcactgggtaagggtggctccggccaccatcatcaccatcac

SEQ ID NO: 258 - protein, 211 aa, synthetic construct
  REGION 1..211: note = Variant of 3'O-kinase
MAFTIGLTGGIASGKSTVSAMMRELGLPVIDADEAARAVVRPGEEAYRQIVAAFGPGILRADGEIDRAKLGRIVFNDEQQRKVLNAIVHPAVYKKMLAEKEAHIRSGAKTVVLDIPLLFESGLVHWVDKVLVVYVDDDVQLRRLMARNGFTEEEALARIRSQWPMAEKVKRADAVIDNNGTIEETRRQLLAILHQWDALGKGGSGHHHHHH

SEQ ID NO: 259 - DNA, 633 bp, synthetic construct
  misc_feature 1..633: note = Variant of 3'O-kinase
  source 1..633: mol_type = other DNA
atggcgtttaccattggtttaacaggagggatcgcagtaggcaaatcgactgtgagtgccatgatgcgtgaactgggtctgccggtcatcgatgctgacgaggcaacccgcgaactggtgcgtccaggcgaagaagcttatcgccagattgtagctgcgttcggtccgggcattcttcgtgccgatggcgagatcgatcgcgccaaattgggtcgtatcgtgtttgctgacgaacaacaacgtaaggtgctgaatgcgattgtactgcctgcagtctataagaagatgctcgctgagaaagaagctcatatccgctcaggcgccaagacggttgtgctggatatcccgctgctgttcgaatccggattgtggcattgggtcgacaaagtgctcgtggtgtacgtcgatgatgatgttcagttacgccgccttatggcacgtaacgggtttaccgaagaagaagctctggcccgcattcgttcacagtggcccatggccgagaaagttaaacgtgcagacgctgtaatcgacaataatggcacgattgaagaaacccgccgccagctgctggccattttacaccagtgggatgcactgggtaagggtggctccggccaccatcatcaccatcac

SEQ ID NO: 260 - protein, 211 aa, synthetic construct
  REGION 1..211: note = Variant of 3'O-kinase
MAFTIGLTGGIAVGKSTVSAMMRELGLPVIDADEATRELVRPGEEAYRQIVAAFGPGILRADGEIDRAKLGRIVFADEQQRKVLNAIVLPAVYKKMLAEKEAHIRSGAKTVVLDIPLLFESGLWHWVDKVLVVYVDDDVQLRRLMARNGFTEEEALARIRSQWPMAEKVKRADAVIDNNGTIEETRRQLLAILHQWDALGKGGSGHHHHHH

SEQ ID NO: 261 - DNA, 633 bp, synthetic construct
  misc_feature 1..633: note = Variant of 3'O-kinase
  source 1..633: mol_type = other DNA
atggcgtttaccattggtttaacaggagggatcgcatcgggcaaatcgactgtgagtgccatgatgcgtgaactgggtctgccggtcatcgatgctgacgaggcagcacgcgccgttgttcgtccaggcgaagaagcttatcgccagattgtagctgcgttcggtccgggcattcttcgtgccgatggcgagatcgatcgcgccaaattgggtgctatcaagtttgctgacgaacaacaacgtaaggtgctgaatgcgattgtactgcctgcagtccgtaagaagatgctcgctgagaaagaagctcatatccgctcaggcgccaagacggttgtgctggatatcccgctgctgttcgaatccggattgacccattgggtcgacaaagtgctcgtggtgtacgtcgatgatgatgttcagttacgccgccttatggcacgtaacgggtttaccgaagaagaagctctggcccgcattcgttcacagtggcccatggccgagaaagttaaacgtgcagacgctgtaatcgacaataatggcacgattgaagaaacccgccgccagctgctggccattttacaccagtgggatgcactgggtaagggtggctccggccaccatcatcaccatcac

SEQ ID NO: 262 - protein, 211 aa, synthetic construct
  REGION 1..211: note = Variant of 3'O-kinase
MAFTIGLTGGIASGKSTVSAMMRELGLPVIDADEAARAVVRPGEEAYRQIVAAFGPGILRADGEIDRAKLGAIKFADEQQRKVLNAIVLPAVRKKMLAEKEAHIRSGAKTVVLDIPLLFESGLTHWVDKVLVVYVDDDVQLRRLMARNGFTEEEALARIRSQWPMAEKVKRADAVIDNNGTIEETRRQLLAILHQWDALGKGGSGHHHHHH

SEQ ID NO: 263 - DNA, 633 bp, synthetic construct
  misc_feature 1..633: note = Variant of 3'O-kinase
  source 1..633: mol_type = other DNA
atggcgtttaccattggtttaacaggagggatcgcatcgggcaaatcgactgtgagtgccatgatgcgtgaactgggtctgccggtcatcgatgctgacgaggcagcacgcgccgttgttcgtccaggcgaagaagcttatcgccagattgtagctgcgttcggtccgggcattcttcgtgccgatggcgagatcgatcgcgccaaattgggtcgtatcgtgtttgctgacgaacaacaacgtaaggtgctgaatgcgattgtaggtcctgcagtctataagaagatgctcgctgagaaagaagctcatatccgctcaggcgccaagacggttgtgctggatatcccgctgctgttcgaatccggattgacccattgggtcgacaaagtgctcgtggtgtacgtcgatgatgatgttcagttacgccgccttatggcacgtaacgggtttaccgaagaagaagctctggcccgcattcgttcacagtggcccatggccgagaaagttaaacgtgcagacgctgtaatcgacaataatggcacgattgaagaaacccgccgccagctgctggccattttacaccagtgggatgcactgggtaagggtggctccggccaccatcatcaccatcac

SEQ ID NO: 264 - protein, 211 aa, synthetic construct
  REGION 1..211: note = Variant of 3'O-kinase
MAFTIGLTGGIASGKSTVSAMMRELGLPVIDADEAARAVVRPGEEAYRQIVAAFGPGILRADGEIDRAKLGRIVFADEQQRKVLNAIVGPAVYKKMLAEKEAHIRSGAKTVVLDIPLLFESGLTHWVDKVLVVYVDDDVQLRRLMARNGFTEEEALARIRSQWPMAEKVKRADAVIDNNGTIEETRRQLLAILHQWDALGKGGSGHHHHHH

SEQ ID NO: 265 - DNA, 633 bp, synthetic construct
  misc_feature 1..633: note = Variant of 3'O-kinase
  source 1..633: mol_type = other DNA
atggcgtttaccattggtttaacaggagggatcgcatcgggtaaatcgactgtgagtgccatgatgcgtgaactgggtctgccggtcatcgatgctgacgaggcagcccgcgaagtgatgcgtccaggcgaagaagcttatcgccagattgtagctgcgttcggtccgggcattcttcgtgccgatggcgagatcgatcgcgccaaattgggtgctatcgtgtttaacgacgaacaacaacgtaaggtgctgaatgcgattgtaagtcctgcagtccgtaagaagatgctcgctgagaaagaagctcatatccgctcaggcgccaagacggttgtgctggatatcccgctgctgttcgaatccggattgtggcattgggtcgacaaagtgctcgtggtgtacgtcgatgatgatgttcagttacgccgccttatggcacgtaacgggtttaccgaagaagaagctctggcccgcattcgttcacagtggcccatggccgagaaagttaaacgtgcagacgctgtaatcgacaataatggcacgattgaagaaacccgccgccagctgctggccattttacaccagtgggatgcactgggtaagggtggctccggccaccatcatcaccatcac

SEQ ID NO: 266 - protein, 211 aa, synthetic construct
  REGION 1..211: note = Variant of 3'O-kinase
MAFTIGLTGGIASGKSTVSAMMRELGLPVIDADEAAREVMRPGEEAYRQIVAAFGPGILRADGEIDRAKLGAIVFNDEQQRKVLNAIVSPAVRKKMLAEKEAHIRSGAKTVVLDIPLLFESGLWHWVDKVLVVYVDDDVQLRRLMARNGFTEEEALARIRSQWPMAEKVKRADAVIDNNGTIEETRRQLLAILHQWDALGKGGSGHHHHHH

SEQ ID NO: 267 - DNA, 633 bp, synthetic construct
  misc_feature 1..633: note = Variant of 3'O-kinase
  source 1..633: mol_type = other DNA
atggcgtttaccattggtttaacaggagggatcgcaagcggcaaatcgactgtgagtgccatgatgcgtgaactgggtctgccggtcatcgatgctgacgaggcagcacgcgccgttgttcgtccaggcgaagaagcttatcgccagattgtagctgcgttcggtccgggcattcttcgtgccgatggcgagatcgatcgcgccaaattgggtgccatcgtgtttaacgacgaacaacaacgtaaggtgctgaatgcgattgtactgcctgcagtctataagaagatgctcgctgagaaagaagctcatatccgctcaggcgccaagacggttgtgctggatatcccgctgctgttcgaatccggattgacccattgggtcgacaaagtgctcgtggtgtacgtcgatgatgatgttcagttacgccgccttatggcacgtaacgggtttaccgaagaagaagctctggcccgcattcgttcacagtggcccatggccgagaaagttaaacgtgcagacgctgtaatcgacaataatggcacgattgaagaaacccgccgccagctgctggccattttacaccagtgggatgcactgggtaagggtggctccggccaccatcatcaccatcac

SEQ ID NO: 268 - protein, 211 aa, synthetic construct
  REGION 1..211: note = Variant of 3'O-kinase
MAFTIGLTGGIASGKSTVSAMMRELGLPVIDADEAARAVVRPGEEAYRQIVAAFGPGILRADGEIDRAKLGAIVFNDEQQRKVLNAIVLPAVYKKMLAEKEAHIRSGAKTVVLDIPLLFESGLTHWVDKVLVVYVDDDVQLRRLMARNGFTEEEALARIRSQWPMAEKVKRADAVIDNNGTIEETRRQLLAILHQWDALGKGGSGHHHHHH

SEQ ID NO: 269 - DNA, 633 bp, synthetic construct
  misc_feature 1..633: note = Variant of 3'O-kinase
  source 1..633: mol_type = other DNA
atggcgtttaccattggtttaacaggagggatcgcagcgggcaaatcgactgtgagtgccatgatgcgtgaactgggtctgccggtcatcgatgctgacgaggcagcacgcgccgttgttcgtccaggcgaagaagcttatcgccagattgtagctgcgttcggtccgggcattcttcgtgccgatggcgagatcgatcgcgccaaattgggtgctatcgtgtttaacgacgaacaacaacgtaaggtgctgaatgcgattgtacaccctgcagtccgtaagaagatgctcgctgagaaagaagctcatatccgctcaggcgccaagacggttgtgctggatatcccgctgctgttcgaatccggattggttcattgggtcgacaaagtgctcgtggtgtacgtcgatgatgatgttcagttacgccgccttatggcacgtaacgggtttaccgaagaagaagctctggcccgcattcgttcacagtggcccatggccgagaaagttaaacgtgcagacgctgtaatcgacaataatggcacgattgaagaaacccgccgccagctgctggccattttacaccagtgggatgcactgggtaagggtggctccggccaccatcatcaccatcac

SEQ ID NO: 270 - protein, 211 aa, synthetic construct
  REGION 1..211: note = Variant of 3'O-kinase
MAFTIGLTGGIAAGKSTVSAMMRELGLPVIDADEAARAVVRPGEEAYRQIVAAFGPGILRADGEIDRAKLGAIVFNDEQQRKVLNAIVHPAVRKKMLAEKEAHIRSGAKTVVLDIPLLFESGLVHWVDKVLVVYVDDDVQLRRLMARNGFTEEEALARIRSQWPMAEKVKRADAVIDNNGTIEETRRQLLAILHQWDALGKGGSGHHHHHH

SEQ ID NO: 271 - DNA, 633 bp, synthetic construct
  misc_feature 1..633: note = Variant of 3'O-kinase
  source 1..633: mol_type = other DNA
atggcgtttaccattggtttaacaggagggatcgcatcgggcaaatcgactgtgagtgccatgatgcgtgaactgggtctgccggtcatcgatgctgacgaggcagcacgcgccgttgttcgtccaggcgaagaagcttatcgccagattgtagctgcgttcggtccgggcattcttcgtgccgatggcgagatcgatcgcgccaaattgggtgctatcgtgtttaacgacgaacaacaacgtaaggtgctgaatgcgattgtactgcctgcagtccgtaagaagatgctcgctgagaaagaagctcatatccgctcaggcgccaagacggttgtgctggatatcccgctgctgttcgaatccggattgtggcattgggtcgacaaagtgctcgtggtgtacgtcgatgatgatgttcagttacgccgccttatggcacgtaacgggtttaccgaagaagaagctctggcccgcattcgttcacagtggcccatggccgagaaagttaaacgtgcagacgctgtaatcgacaataatggcacgattgaagaaacccgccgccagctgctggccattttacaccagtgggatgcactgggtaagggtggctccggccaccatcatcaccatcac

SEQ ID NO: 272 - protein, 211 aa, synthetic construct
  REGION 1..211: note = Variant of 3'O-kinase
MAFTIGLTGGIASGKSTVSAMMRELGLPVIDADEAARAVVRPGEEAYRQIVAAFGPGILRADGEIDRAKLGAIVFNDEQQRKVLNAIVLPAVRKKMLAEKEAHIRSGAKTVVLDIPLLFESGLWHWVDKVLVVYVDDDVQLRRLMARNGFTEEEALARIRSQWPMAEKVKRADAVIDNNGTIEETRRQLLAILHQWDALGKGGSGHHHHHH

SEQ ID NO: 273 - DNA, 633 bp, synthetic construct
  misc_feature 1..633: note = Variant of 3'O-kinase
  source 1..633: mol_type = other DNA
atggcgtttaccattggtttaacaggagggatcgcatcgggcaaatcgactgtgagtgccatgatgcgtgaactgggtctgccggtcatcgatgctgacgaggcagcacgcgccgttgttcgtccaggcgaagaagcttatcgccagattgtagctgcgttcggtccgggcattcttcgtgccgatggcgagatcgatcgcgccaaattgggtgctatcgtgtttgctgacgaacaacaacgtaaggtgctgaatgcgattgtaggtcctgcagtctataagaagatgctcgctgagaaagaagctcatatccgctcaggcgccaagacggttgtgctggatatcccgctgctgttcgaatccggattggttcattgggtcgacaaagtgctcgtggtgtacgtcgatgatgatgttcagttacgccgccttatggcacgtaacgggtttaccgaagaagaagctctggcccgcattcgttcacagtggcccatggccgagaaagttaaacgtgcagacgctgtaatcgacaataatggcacgattgaagaaacccgccgccagctgctggccattttacaccagtgggatgcactgggtaagggtggctccggccaccatcatcaccatcac

SEQ ID NO: 274 - protein, 211 aa, synthetic construct
  REGION 1..211: note = Variant of 3'O-kinase
MAFTIGLTGGIASGKSTVSAMMRELGLPVIDADEAARAVVRPGEEAYRQIVAAFGPGILRADGEIDRAKLGAIVFADEQQRKVLNAIVGPAVYKKMLAEKEAHIRSGAKTVVLDIPLLFESGLVHWVDKVLVVYVDDDVQLRRLMARNGFTEEEALARIRSQWPMAEKVKRADAVIDNNGTIEETRRQLLAILHQWDALGKGGSGHHHHHH

SEQ ID NO: 275 - DNA, 633 bp, synthetic construct
  misc_feature 1..633: note = Variant of 3'O-kinase
  source 1..633: mol_type = other DNA
atggcgtttaccattggtttaacaggagggatcgcagtaggcaaatcgactgtgagtgccatgatgcgtgaactgggtctgccggtcatcgatgctgacgaggcagcacgcgccgttgttcgtccaggcgaagaagcttatcgccagattgtagctgcgttcggtccgggcattcttcgtgccgatggcgagatcgatcgcgccaaattgggtcgtatcgtgtttaacgacgaacaacaacgtaaggtgctgaatgcgattgtaggtcctgcagtccgtaagaagatgctcgctgagaaagaagctcatatccgctcaggcgccaagacggttgtgctggatatcccgctgctgttcgaatccggattgactcattgggtcgacaaagtgctcgtggtgtacgtcgatgatgatgttcagttacgccgccttatggcacgtaacgggtttaccgaagaagaagctctggcccgcattcgttcacagtggcccatggccgagaaagttaaacgtgcagacgctgtaatcgacaataatggcacgattgaagaaacccgccgccagctgctggccattttacaccagtgggatgcactgggtaagggtggctccggccaccatcatcaccatcac

SEQ ID NO: 276 - protein, 211 aa, synthetic construct
  REGION 1..211: note = Variant of 3'O-kinase
MAFTIGLTGGIAVGKSTVSAMMRELGLPVIDADEAARAVVRPGEEAYRQIVAAFGPGILRADGEIDRAKLGRIVFNDEQQRKVLNAIVGPAVRKKMLAEKEAHIRSGAKTVVLDIPLLFESGLTHWVDKVLVVYVDDDVQLRRLMARNGFTEEEALARIRSQWPMAEKVKRADAVIDNNGTIEETRRQLLAILHQWDALGKGGSGHHHHHH

SEQ ID NO: 277 - DNA, 633 bp, synthetic construct
  misc_feature 1..633: note = Variant of 3'O-kinase
  source 1..633: mol_type = other DNA
atggcgtttaccattggtttaacaggagggatcgcaagcggcaaatcgactgtgagtgccatgatgcgtgaactgggtctgccggtcatcgatgctgacgaggcagcacgcgccgttgttcgtccaggcgaagaagcttatcgccagattgtagctgcgttcggtccgggcattcttcgtgccgatggcgagatcgatcgcgccaaattgggtcgtatcaagtttaacgacgaacaacaacgtaaggtgctgaatgcgattgtacaccctgcagtctataagaagatgctcgctgagaaagaagctcatatccgctcaggcgccaagacggttgtgctggatatcccgctgctgttcgaatccggattgactcattgggtcgacaaagtgctcgtggtgtacgtcgatgatgatgttcagttacgccgccttatggcacgtaacgggtttaccgaagaagaagctctggcccgcattcgttcacagtggcccatggccgagaaagttaaacgtgcagacgctgtaatcgacaataatggcacgattgaagaaacccgccgccagctgctggccattttacaccagtgggatgcactgggtaagggtggctccggccaccatcatcaccatcac

SEQ ID NO: 278 - protein, 211 aa, synthetic construct
  REGION 1..211: note = Variant of 3'O-kinase
MAFTIGLTGGIASGKSTVSAMMRELGLPVIDADEAARAVVRPGEEAYRQIVAAFGPGILRADGEIDRAKLGRIKFNDEQQRKVLNAIVHPAVYKKMLAEKEAHIRSGAKTVVLDIPLLFESGLTHWVDKVLVVYVDDDVQLRRLMARNGFTEEEALARIRSQWPMAEKVKRADAVIDNNGTIEETRRQLLAILHQWDALGKGGSGHHHHHH

SEQ ID NO: 279 - DNA, 633 bp, synthetic construct
  misc_feature 1..633: note = Variant of 3'O-kinase
  source 1..633: mol_type = other DNA
atggcgtttaccattggtttaacaggagggatcgcagcgggcaaatcgactgtgagtgccatgatgcgtgaactgggtctgccggtcatcgatgctgacgaggcagcacgcgccgttgttcgtccaggcgaagaagcttatcgccagattgtagctgcgttcggtccgggcattcttcgtgccgatggcgagatcgatcgcgccaaattgggtcgtatcgtgtttgctgacgaacaacaacgtaaggtgctgaatgcgattgtacatcctgcagtccgcaagaagatgctcgctgagaaagaagctcatatccgctcaggcgccaagacggttgtgctggatatcccgctgctgttcgaatccggattgactcattgggtcgacaaagtgctcgtggtgtacgtcgatgatgatgttcagttacgccgccttatggcacgtaacgggtttaccgaagaagaagctctggcccgcattcgttcacagtggcccatggccgagaaagttaaacgtgcagacgctgtaatcgacaataatggcacgattgaagaaacccgccgccagctgctggccattttacaccagtgggatgcactgggtaagggtggctccggccaccatcatcaccatcac

SEQ ID NO: 280 - protein, 211 aa, synthetic construct
  REGION 1..211: note = Variant of 3'O-kinase
MAFTIGLTGGIAAGKSTVSAMMRELGLPVIDADEAARAVVRPGEEAYRQIVAAFGPGILRADGEIDRAKLGRIVFADEQQRKVLNAIVHPAVRKKMLAEKEAHIRSGAKTVVLDIPLLFESGLTHWVDKVLVVYVDDDVQLRRLMARNGFTEEEALARIRSQWPMAEKVKRADAVIDNNGTIEETRRQLLAILHQWDALGKGGSGHHHHHH

SEQ ID NO: 281 - DNA, 633 bp, synthetic construct
  misc_feature 1..633: note = Variant of 3'O-kinase
  source 1..633: mol_type = other DNA
atggcgtttaccattggtttaacaggagggatcgcaagcggcaaatcgactgtgagtgccatgatgcgtgaactgggtctgccggtcatcgatgctgacgaggcagcccgcgaactggtgcgtccaggcgaagaagcttatcgccagattgtagctgcgttcggtccgggcattcttcgtgccgatggcgagatcgatcgcgccaaattgggtgccatcgtgtttaacgacgaacaacaacgtaaggtgctgaatgcgattgtacatcctgcagtccgcaagaagatgctcgctgagaaagaagctcatatccgctcaggcgccaagacggttgtgctggatatcccgctgctgttcgaatccggattgacccattgggtcgacaaagtgctcgtggtgtacgtcgatgatgatgttcagttacgccgccttatggcacgtaacgggtttaccgaagaagaagctctggcccgcattcgttcacagtggcccatggccgagaaagttaaacgtgcagacgctgtaatcgacaataatggcacgattgaagaaacccgccgccagctgctggccattttacaccagtgggatgcactgggtaagggtggctccggccaccatcatcaccatcac

SEQ ID NO: 282 - protein, 211 aa, synthetic construct
  REGION 1..211: note = Variant of 3'O-kinase
MAFTIGLTGGIASGKSTVSAMMRELGLPVIDADEAARELVRPGEEAYRQIVAAFGPGILRADGEIDRAKLGAIVFNDEQQRKVLNAIVHPAVRKKMLAEKEAHIRSGAKTVVLDIPLLFESGLTHWVDKVLVVYVDDDVQLRRLMARNGFTEEEALARIRSQWPMAEKVKRADAVIDNNGTIEETRRQLLAILHQWDALGKGGSGHHHHHH

SEQ ID NO: 283 - DNA, 633 bp, synthetic construct
  misc_feature 1..633: note = Variant of 3'O-kinase
  source 1..633: mol_type = other DNA
atggcgtttaccattggtttaacaggagggatcgcatcgggcaaatcgactgtgagtgccatgatgcgtgaactgggtctgccggtcatcgatgctgacgaggcaacccgcgcactgatgcgtccaggcgaagaagcttatcgccagattgtagctgcgttcggtccgggcattcttcgtgccgatggcgagatcgatcgcgccaaattgggtgctatcgtgtttgctgacgaacaacaacgtaaggtgctgaatgcgattgtacaccctgcagtctataagaagatgctcgctgagaaagaagctcatatccgctcaggcgccaagacggttgtgctggatatcccgctgctgttcgaatccggattgactcattgggtcgacaaagtgctcgtggtgtacgtcgatgatgatgttcagttacgccgccttatggcacgtaacgggtttaccgaagaagaagctatggcccgcattcgttcacagtggcccatggccgagaaagttaaacgtgcagacgctgtaatcgacaataatggcacgattgaagaaacccgccgccagctgctggccattttacaccagtgggatgcactgggtaagggtggctccggccaccatcatcaccatcac

SEQ ID NO: 284 - protein, 211 aa, synthetic construct
  REGION 1..211: note = Variant of 3'O-kinase
MAFTIGLTGGIASGKSTVSAMMRELGLPVIDADEATRALMRPGEEAYRQIVAAFGPGILRADGEIDRAKLGAIVFADEQQRKVLNAIVHPAVYKKMLAEKEAHIRSGAKTVVLDIPLLFESGLTHWVDKVLVVYVDDDVQLRRLMARNGFTEEEAMARIRSQWPMAEKVKRADAVIDNNGTIEETRRQLLAILHQWDALGKGGSGHHHHHH

SEQ ID NO: 285 - DNA, 633 bp, synthetic construct
  misc_feature 1..633: note = Variant of 3'O-kinase
  source 1..633: mol_type = other DNA
atggcgtttaccattggtttaacaggagggatcgcagtaggcaaatcgactgtgagtgccatgatgcgtgaactgggtctgccggtcatcgatgctgacgaggcagcacgcgccgttgttcgtccaggcgaagaagcttatcgccagattgtagctgcgttcggtccgggcattcttcgtgccgatggcgagatcgatcgcgccaaattgggtgctatcgtgtttaacgacgaacaacaacgtaaggtgctgaatgcgattgtacaccctgcagtccgtaagaagatgctcgctgagaaagaagctcatatccgctcaggcgccaagacggttgtgctggatatcccgctgctgttcgaatccggattggttcattgggtcgacaaagtgctcgtggtgtacgtcgatgatgatgttcagttacgccgccttatggcacgtaacgggtttaccgaagaagaagctctggcccgcattcgttcacagtggcccatggccgagaaagttaaacgtgcagacgctgtaatcgacaataatggcacgattgaagaaacccgccgccagctgctggccattttacaccagtgggatgcactgggtaagggtggctccggccaccatcatcaccatcac

SEQ ID NO: 286 - protein, 211 aa, synthetic construct
  REGION 1..211: note = Variant of 3'O-kinase
MAFTIGLTGGIAVGKSTVSAMMRELGLPVIDADEAARAVVRPGEEAYRQIVAAFGPGILRADGEIDRAKLGAIVFNDEQQRKVLNAIVHPAVRKKMLAEKEAHIRSGAKTVVLDIPLLFESGLVHWVDKVLVVYVDDDVQLRRLMARNGFTEEEALARIRSQWPMAEKVKRADAVIDNNGTIEETRRQLLAILHQWDALGKGGSGHHHHHH

SEQ ID NO: 287 - DNA, 633 bp, synthetic construct
  misc_feature 1..633: note = Variant of 3'O-kinase
  source 1..633: mol_type = other DNA
atggcgtttaccattggtttaacaggagggatcgcagtaggcaaatcgactgtgagtgccatgatgcgtgaactgggtctgccggtcatcgatgctgacgaggcagcacgcgccgttgttcgtccaggcgaagaagcttatcgccagattgtagctgcgttcggtccgggcattcttcgtgccgatggcgagatcgatcgcgccaaattgggtcgtatcaagtttgctgacgaacaacaacgtaaggtgctgaatgcgattgtactgcctgcagtctataagaagatgctcgctgagaaagaagctcatatccgctcaggcgccaagacggttgtgctggatatcccgctgctgttcgaatccggattggttcattgggtcgacaaagtgctcgtggtgtacgtcgatgatgatgttcagttacgccgccttatggcacgtaacgggtttaccgaagaagaagctctggcccgcattcgttcacagtggcccatggccgagaaagttaaacgtgcagacgctgtaatcgacaataatggcacgattgaagaaacccgccgccagctgctggccattttacaccagtgggatgcactgggtaagggtggctccggccaccatcatcaccatcac

SEQ ID NO: 288 - protein, 211 aa, synthetic construct
  REGION 1..211: note = Variant of 3'O-kinase
MAFTIGLTGGIAVGKSTVSAMMRELGLPVIDADEAARAVVRPGEEAYRQIVAAFGPGILRADGEIDRAKLGRIKFADEQQRKVLNAIVLPAVYKKMLAEKEAHIRSGAKTVVLDIPLLFESGLVHWVDKVLVVYVDDDVQLRRLMARNGFTEEEALARIRSQWPMAEKVKRADAVIDNNGTIEETRRQLLAILHQWDALGKGGSGHHHHHH

SEQ ID NO: 289 - DNA, 633 bp, synthetic construct
  misc_feature 1..633: note = Variant of 3'O-kinase
  source 1..633: mol_type = other DNA
atggcgtttaccattggtttaacaggagggatcgcagtaggcaaatcgactgtgagtgccatgatgcgtgaactgggtctgccggtcatcgatgctgacgaggcagcacgcgccgttgttcgtccaggcgaagaagcttatcgccagattgtagctgcgttcggtccgggcattcttcgtgccgatggcgagatcgatcgcgccaaattgggtcgtatcgtgtttaacgacgaacaacaacgtaaggtgctgaatgcgattgtacatcctgcagtccgcaagaagatgctcgctgagaaagaagctcatatccgctcaggcgccaagacggttgtgctggatatcccgctgctgttcgaatccggattgtggcattgggtcgacaaagtgctcgtggtgtacgtcgatgatgatgttcagttacgccgccttatggcacgtaacgggtttaccgaagaagaagctctggcccgcattcgttcacagtggcccatggccgagaaagttaaacgtgcagacgctgtaatcgacaataatggcacgattgaagaaacccgccgccagctgctggccattttacaccagtgggatgcactgggtaagggtggctccggccaccatcatcaccatcac

SEQ ID NO: 290 - protein, 211 aa, synthetic construct
  REGION 1..211: note = Variant of 3'O-kinase
MAFTIGLTGGIAVGKSTVSAMMRELGLPVIDADEAARAVVRPGEEAYRQIVAAFGPGILRADGEIDRAKLGRIVFNDEQQRKVLNAIVHPAVRKKMLAEKEAHIRSGAKTVVLDIPLLFESGLWHWVDKVLVVYVDDDVQLRRLMARNGFTEEEALARIRSQWPMAEKVKRADAVIDNNGTIEETRRQLLAILHQWDALGKGGSGHHHHHH

SEQ ID NO: 291 - DNA, 633 bp, synthetic construct
  misc_feature 1..633: note = Variant of 3'O-kinase
  source 1..633: mol_type = other DNA
atggcgtttaccattggtttaacaggagggatcgcagtaggcaaatcgactgtgagtgccatgatgcgtgaactgggtctgccggtcatcgatgctgacgaggcaacccgcgcagtgatgcgtccaggcgaagaagcttatcgccagattgtagctgcgttcggtccgggcattcttcgtgccgatggcgagatcgatcgcgccaaattgggtcgtatcgtgtttaacgacgaacaacaacgtaaggtgctgaatgcgattgtacatcctgcagtccgtaagaagatgctcgctgagaaagaagctcatatccgctcaggcgccaagacggttgtgctggatatcccgctgctgttcgaatccggattgacccattgggtcgacaaagtgctcgtggtgtacgtcgatgatgatgttcagttacgccgccttatggcacgtaacgggtttaccgaagaagaagctatggcccgcattcgttcacagtggcccatggccgagaaagttaaacgtgcagacgctgtaatcgacaataatggcacgattgaagaaacccgccgccagctgctggccattttacaccagtgggatgcactgggtaagggtggctccggccaccatcatcaccatcac

SEQ ID NO: 292 - protein, 211 aa, synthetic construct
  REGION 1..211: note = Variant of 3'O-kinase
MAFTIGLTGGIAVGKSTVSAMMRELGLPVIDADEATRAVMRPGEEAYRQIVAAFGPGILRADGEIDRAKLGRIVFNDEQQRKVLNAIVHPAVRKKMLAEKEAHIRSGAKTVVLDIPLLFESGLTHWVDKVLVVYVDDDVQLRRLMARNGFTEEEAMARIRSQWPMAEKVKRADAVIDNNGTIEETRRQLLAILHQWDALGKGGSGHHHHHH

SEQ ID NO: 293 - DNA, 633 bp, synthetic construct
  misc_feature 1..633: note = Variant of 3'O-kinase
  source 1..633: mol_type = other DNA
atggcgtttaccattggtttaacaggagggatcgcatcgggcaaatcgactgtgagtgccatgatgcgtgaactgggtctgccggtcatcgatgctgacgaggcagcacgcgccgttgtgcgtccaggcgaagaagcttatcgccagattgtagctgcgttcggtccgggcattcttcgtgccgatggcgagatcgatcgcgccaaattgggtcgtatcaagtttgctgacgaacaacaacgtaaggtgctgaatgcgattgtaggtcctgcagtccgtaagaagatgctcgctgagaaagaagctcatatccgctcaggcgccaagacggttgtgctggatatcccgctgctgttcgaatccggattggttcattgggtcgacaaagtgctcgtggtgtacgtcgatgatgatgttcagttacgccgccttatggcacgtaacgggtttaccgaagaagaagctctggcccgcattcgttcacagtggcccatggccgagaaagttaaacgtgcagacgctgtaatcgacaataatggcacgattgaagaaacccgccgccagctgctggccattttacaccagtgggatgcactgggtaagggtggctccggccaccatcatcaccatcac

SEQ ID NO: 294 - protein, 211 aa, synthetic construct
  REGION 1..211: note = Variant of 3'O-kinase
MAFTIGLTGGIASGKSTVSAMMRELGLPVIDADEAARAVVRPGEEAYRQIVAAFGPGILRADGEIDRAKLGRIKFADEQQRKVLNAIVGPAVRKKMLAEKEAHIRSGAKTVVLDIPLLFESGLVHWVDKVLVVYVDDDVQLRRLMARNGFTEEEALARIRSQWPMAEKVKRADAVIDNNGTIEETRRQLLAILHQWDALGKGGSGHHHHHH

SEQ ID NO: 295 - DNA, 633 bp, synthetic construct
  misc_feature 1..633: note = Variant of 3'O-kinase
  source 1..633: mol_type = other DNA
atggcgtttaccattggtttaacaggagggatcgcagcgggcaaatcgactgtgagtgccatgatgcgtgaactgggtctgccggtcatcgatgctgacgaggcaacccgcgaagtgatgcgtccaggcgaagaagcttatcgccagattgtagctgcgttcggtccgggcattcttcgtgccgatggcgagatcgatcgcgccaaattgggtgctatcgtgtttaacgacgaacaacaacgtaaggtgctgaatgcgattgtacatcctgcagtccgcaagaagatgctcgctgagaaagaagctcatatccgctcaggcgccaagacggttgtgctggatatcccgctgctgttcgaatccggattgacccattgggtcgacaaagtgctcgtggtgtacgtcgatgatgatgttcagttacgccgccttatggcacgtaacgggtttaccgaagaagaagctctggcccgcattcgttcacagtggcccatggccgagaaagttaaacgtgcagacgctgtaatcgacaataatggcacgattgaagaaacccgccgccagctgctggccattttacaccagtgggatgcactgggtaagggtggctccggccaccatcatcaccatcac

SEQ ID NO: 296 - protein, 211 aa, synthetic construct
  REGION 1..211: note = Variant of 3'O-kinase
MAFTIGLTGGIAAGKSTVSAMMRELGLPVIDADEATREVMRPGEEAYRQIVAAFGPGILRADGEIDRAKLGAIVFNDEQQRKVLNAIVHPAVRKKMLAEKEAHIRSGAKTVVLDIPLLFESGLTHWVDKVLVVYVDDDVQLRRLMARNGFTEEEALARIRSQWPMAEKVKRADAVIDNNGTIEETRRQLLAILHQWDALGKGGSGHHHHHH

SEQ ID NO: 297 - DNA, 633 bp, synthetic construct
  misc_feature 1..633: note = Variant of 3'O-kinase
  source 1..633: mol_type = other DNA
atggcgtttaccattggtttaacaggagggatcgcagtaggcaaatcgactgtgagtgccatgatgcgtgaactgggtctgccggtcatcgatgctgacgaggcagcacgcgccgttgttcgtccaggcgaagaagcttatcgccagattgtagctgcgttcggtccgggcattcttcgtgccgatggcgagatcgatcgcgccaaattgggtcgtatcgtgtttaacgacgaacaacaacgtaaggtgctgaatgcgattgtacatcctgcagtccgcaagaagatgctcgctgagaaagaagctcatatccgctcaggcgccaagacggttgtgctggatatcccgctgctgttcgaatccggattgacccattgggtcgacaaagtgctcgtggtgtacgtcgatgatgatgttcagttacgccgccttatggcacgtaacgggtttaccgaagaagaagctctggcccgcattcgttcacagtggcccatggccgagaaagttaaacgtgcagacgctgtaatcgacaataatggcacgattgaagaaacccgccgccagctgctggccattttacaccagtgggatgcactgggtaagggtggctccggccaccatcatcaccatcac

SEQ ID NO: 298 - protein, 211 aa, synthetic construct
  REGION 1..211: note = Variant of 3'O-kinase
MAFTIGLTGGIAVGKSTVSAMMRELGLPVIDADEAARAVVRPGEEAYRQIVAAFGPGILRADGEIDRAKLGRIVFNDEQQRKVLNAIVHPAVRKKMLAEKEAHIRSGAKTVVLDIPLLFESGLTHWVDKVLVVYVDDDVQLRRLMARNGFTEEEALARIRSQWPMAEKVKRADAVIDNNGTIEETRRQLLAILHQWDALGKGGSGHHHHHH

SEQ ID NO: 299 - DNA, 633 bp, synthetic construct
  misc_feature 1..633: note = Variant of 3'O-kinase
  source 1..633: mol_type = other DNA
atggcgtttaccattggtttaacaggagggatcgcatcgggcaaatcgactgtgagtgccatgatgcgtgaactgggtctgccggtcatcgatgctgacgaggcagcacgcgccgttgttcgtccaggcgaagaagcttatcgccagattgtagctgcgttcggtccgggcattcttcgtgccgatggcgagatcgatcgcgccaaattgggtgctatcgtgtttgctgacgaacaacaacgtaaggtgctgaatgcgattgtacaccctgcagtctataagaagatgctcgctgagaaagaagctcatatccgctcaggcgccaagacggttgtgctggatatcccgctgctgttcgaatccggattgactcattgggtcgacaaagtgctcgtggtgtacgtcgatgatgatgttcagttacgccgccttatggcacgtaacgggtttaccgaagaagaagctctggcccgcattcgttcacagtggcccatggccgagaaagttaaacgtgcagacgctgtaatcgacaataatggcacgattgaagaaacccgccgccagctgctggccattttacaccagtgggatgcactgggtaagggtggctccggccaccatcatcaccatcac

SEQ ID NO: 300 - protein, 211 aa, synthetic construct
  REGION 1..211: note = Variant of 3'O-kinase
MAFTIGLTGGIASGKSTVSAMMRELGLPVIDADEAARAVVRPGEEAYRQIVAAFGPGILRADGEIDRAKLGAIVFADEQQRKVLNAIVHPAVYKKMLAEKEAHIRSGAKTVVLDIPLLFESGLTHWVDKVLVVYVDDDVQLRRLMARNGFTEEEALARIRSQWPMAEKVKRADAVIDNNGTIEETRRQLLAILHQWDALGKGGSGHHHHHH

SEQ ID NO: 301 - DNA, 633 bp, synthetic construct
  misc_feature 1..633: note = Variant of 3'O-kinase
  source 1..633: mol_type = other DNA
atggcgtttaccattggtttaacaggagggatcgcagcgggcaaatcgactgtgagtgccatgatgcgtgaactgggtctgccggtcatcgatgctgacgaggcagcacgcgccgttgttcgtccaggcgaagaagcttatcgccagattgtagctgcgttcggtccgggcattcttcgtgccgatggcgagatcgatcgcgccaaattgggtgctatcaagtttaacgacgaacaacaacgtaaggtgctgaatgcgattgtaggtcctgcagtccgtaagaagatgctcgctgagaaagaagctcatatccgctcaggcgccaagacggttgtgctggatatcccgctgctgttcgaatccggattgactcattgggtcgacaaagtgctcgtggtgtacgtcgatgatgatgttcagttacgccgccttatggcacgtaacgggtttaccgaagaagaagctatggcccgcattcgttcacagtggcccatggccgagaaagttaaacgtgcagacgctgtaatcgacaataatggcacgattgaagaaacccgccgccagctgctggccattttacaccagtgggatgcactgggtaagggtggctccggccaccatcatcaccatcac

SEQ ID NO: 302 - protein, 211 aa, synthetic construct
  REGION 1..211: note = Variant of 3'O-kinase
MAFTIGLTGGIAAGKSTVSAMMRELGLPVIDADEAARAVVRPGEEAYRQIVAAFGPGILRADGEIDRAKLGAIKFNDEQQRKVLNAIVGPAVRKKMLAEKEAHIRSGAKTVVLDIPLLFESGLTHWVDKVLVVYVDDDVQLRRLMARNGFTEEEAMARIRSQWPMAEKVKRADAVIDNNGTIEETRRQLLAILHQWDALGKGGSGHHHHHH

SEQ ID NO: 303 - DNA, 633 bp, synthetic construct
  misc_feature 1..633: note = Variant of 3'O-kinase
  source 1..633: mol_type = other DNA
atggcgtttaccattggtttaacaggagggatcgcagtaggcaaatcgactgtgagtgccatgatgcgtgaactgggtctgccggtcatcgatgctgacgaggcagcacgcgccgttgttcgtccaggcgaagaagcttatcgccagattgtagctgcgttcggtccgggcattcttcgtgccgatggcgagatcgatcgcgccaaattgggtgctatcgtgtttaacgacgaacaacaacgtaaggtgctgaatgcgattgtacaccctgcagtccgtaagaagatgctcgctgagaaagaagctcatatccgctcaggcgccaagacggttgtgctggatatcccgctgctgttcgaatccggattgactcattgggtcgacaaagtgctcgtggtgtacgtcgatgatgatgttcagttacgccgccttatggcacgtaacgggtttaccgaagaagaagctatggcccgcattcgttcacagtggcccatggccgagaaagttaaacgtgcagacgctgtaatcgacaataatggcacgattgaagaaacccgccgccagctgctggccattttacaccagtgggatgcactgggtaagggtggctccggccaccatcatcaccatcac

SEQ ID NO: 304 - protein, 211 aa, synthetic construct
  REGION 1..211: note = Variant of 3'O-kinase
MAFTIGLTGGIAVGKSTVSAMMRELGLPVIDADEAARAVVRPGEEAYRQIVAAFGPGILRADGEIDRAKLGAIVFNDEQQRKVLNAIVHPAVRKKMLAEKEAHIRSGAKTVVLDIPLLFESGLTHWVDKVLVVYVDDDVQLRRLMARNGFTEEEAMARIRSQWPMAEKVKRADAVIDNNGTIEETRRQLLAILHQWDALGKGGSGHHHHHH

SEQ ID NO: 305 - DNA, 633 bp, synthetic construct
  misc_feature 1..633: note = Variant of 3'O-kinase
  source 1..633: mol_type = other DNA
atggcgtttaccattggtttaacaggagggatcgcagtaggcaaatcgactgtgagtgccatgatgcgtgaactgggtctgccggtcatcgatgctgacgaggcagcacgcgccgttgtgcgtccaggcgaagaagcttatcgccagattgtagctgcgttcggtccgggcattcttcgtgccgatggcgagatcgatcgcgccaaattgggtcgtatcgtgtttgctgacgaacaacaacgtaaggtgctgaatgcgattgtacatcctgcagtccgtaagaagatgctcgctgagaaagaagctcatatccgctcaggcgccaagacggttgtgctggatatcccgctgctgttcgaatccggattggttcattgggtcgacaaagtgctcgtggtgtacgtcgatgatgatgttcagttacgccgccttatggcacgtaacgggtttaccgaagaagaagctatggcccgcattcgttcacagtggcccatggccgagaaagttaaacgtgcagacgctgtaatcgacaataatggcacgattgaagaaacccgccgccagctgctggccattttacaccagtgggatgcactgggtaagggtggctccggccaccatcatcaccatcac

SEQ ID NO: 306 - protein, 211 aa, synthetic construct
  REGION 1..211: note = Variant of 3'O-kinase
MAFTIGLTGGIAVGKSTVSAMMRELGLPVIDADEAARAVVRPGEEAYRQIVAAFGPGILRADGEIDRAKLGRIVFADEQQRKVLNAIVHPAVRKKMLAEKEAHIRSGAKTVVLDIPLLFESGLVHWVDKVLVVYVDDDVQLRRLMARNGFTEEEAMARIRSQWPMAEKVKRADAVIDNNGTIEETRRQLLAILHQWDALGKGGSGHHHHHH

SEQ ID NO: 307 - DNA, 633 bp, synthetic construct
  misc_feature 1..633: note = Variant of 3'O-kinase
  source 1..633: mol_type = other DNA
atggcgtttaccattggtttaacaggagggatcgcatcgggcaaatcgactgtgagtgccatgatgcgtgaactgggtctgccggtcatcgatgctgacgaggcagcacgcgttgttgttcgtccaggcgaagaagcttatcgccagattgtagctgcgttcggtccgggcattcttcgtgccgatggcgagatcgatcgcgccaaattgggtcgtatcgtgtttgctgacgaacaacaacgtaaggtgctgaatgcgattgtaggtcctgcagtccgtaagaagatgctcgctgagaaagaagctcatatccgctcaggcgccaagacggttgtgctggatatcccgctgctgttcgaatccggattgacccattgggtcgacaaagtgctcgtggtgtacgtcgatgatgatgttcagttacgccgccttatggcacgtaacgggtttaccgaagaagaagctctggcccgcattcgttcacagtggcccatggccgagaaagttaaacgtgcagacgctgtaatcgacaataatggcacgattgaagaaacccgccgccagctgctggccattttacaccagtgggatgcactgggtaagggtggctccggccaccatcatcaccatcac

SEQ ID NO: 308 - protein, 211 aa, synthetic construct
  REGION 1..211: note = Variant of 3'O-kinase
MAFTIGLTGGIASGKSTVSAMMRELGLPVIDADEAARVVVRPGEEAYRQIVAAFGPGILRADGEIDRAKLGRIVFADEQQRKVLNAIVGPAVRKKMLAEKEAHIRSGAKTVVLDIPLLFESGLTHWVDKVLVVYVDDDVQLRRLMARNGFTEEEALARIRSQWPMAEKVKRADAVIDNNGTIEETRRQLLAILHQWDALGKGGSGHHHHHH

SEQ ID NO: 309 - DNA, 633 bp, synthetic construct
  misc_feature 1..633: note = Variant of 3'O-kinase
  source 1..633: mol_type = other DNA
atggcgtttaccattggtttaacaggagggatcgcatcgggcaaatcgactgtgagtgccatgatgcgtgaactgggtctgccggtcatcgatgctgacgaggcagcacgcgccgttgttcgtccaggcgaagaagcttatcgccagattgtagctgcgttcggtccgggcattcttcgtgccgatggcgagatcgatcgcgccaaattgggtcgtatcgtgtttgctgacgaacaacaacgtaaggtgctgaatgcgattgtacatcctgcagtccgtaagaagatgctcgctgagaaagaagctcatatccgctcaggcgccaagacggttgtgctggatatcccgctgctgttcgaatccggattggttcattgggtcgacaaagtgctcgtggtgtacgtcgatgatgatgttcagttacgccgccttatggcacgtaacgggtttaccgaagaagaagctctggcccgcattcgttcacagtggcccatggccgagaaagttaaacgtgcagacgctgtaatcgacaataatggcacgattgaagaaacccgccgccagctgctggccattttacaccagtgggatgcactgggtaagggtggctccggccaccatcatcaccatcac

SEQ ID NO: 310 - protein, 211 aa, synthetic construct
  REGION 1..211: note = Variant of 3'O-kinase
MAFTIGLTGGIASGKSTVSAMMRELGLPVIDADEAARAVVRPGEEAYRQIVAAFGPGILRADGEIDRAKLGRIVFADEQQRKVLNAIVHPAVRKKMLAEKEAHIRSGAKTVVLDIPLLFESGLVHWVDKVLVVYVDDDVQLRRLMARNGFTEEEALARIRSQWPMAEKVKRADAVIDNNGTIEETRRQLLAILHQWDALGKGGSGHHHHHH

SEQ ID NO: 311 - DNA, 633 bp, synthetic construct
  misc_feature 1..633: note = Variant of 3'O-kinase
  source 1..633: mol_type = other DNA
atggcgtttaccattggtttaacaggagggatcgcatcgggcaaatcgactgtgagtgccatgatgcgtgaactgggtctgccggtcatcgatgctgacgaggcagcacgcgaagtgatgcgtccaggcgaagaagcttatcgccagattgtagctgcgttcggtccgggcattcttcgtgccgatggcgagatcgatcgcgccaaattgggtcgtatcgtgtttaacgacgaacaacaacgtaaggtgctgaatgcgattgtacatcctgcagtccgcaagaagatgctcgctgagaaagaagctcatatccgctcaggcgccaagacggttgtgctggatatcccgctgctgttcgaatccggattgacccattgggtcgacaaagtgctcgtggtgtacgtcgatgatgatgttcagttacgccgccttatggcacgtaacgggtttaccgaagaagaagctctggcccgcattcgttcacagtggcccatggccgagaaagttaaacgtgcagacgctgtaatcgacaataatggcacgattgaagaaacccgccgccagctgctggccattttacaccagtgggatgcactgggtaagggtggctccggccaccatcatcaccatcac

SEQ ID NO: 312 - protein, 211 aa, synthetic construct
  REGION 1..211: note = Variant of 3'O-kinase
MAFTIGLTGGIASGKSTVSAMMRELGLPVIDADEAAREVMRPGEEAYRQIVAAFGPGILRADGEIDRAKLGRIVFNDEQQRKVLNAIVHPAVRKKMLAEKEAHIRSGAKTVVLDIPLLFESGLTHWVDKVLVVYVDDDVQLRRLMARNGFTEEEALARIRSQWPMAEKVKRADAVIDNNGTIEETRRQLLAILHQWDALGKGGSGHHHHHH

SEQ ID NO: 313 - DNA, 633 bp, synthetic construct
  misc_feature 1..633: note = Variant of 3'O-kinase
  source 1..633: mol_type = other DNA
atggcgtttaccattggtttaacaggagggatcgcaagcggcaaatcgactgtgagtgccatgatgcgtgaactgggtctgccggtcatcgatgctgacgaggcagcacgcgccgttgttcgtccaggcgaagaagcttatcgccagattgtagctgcgttcggtccgggcattcttcgtgccgatggcgagatcgatcgcgccaaattgggtcgtatcgtgtttgctgacgaacaacaacgtaaggtgctgaatgcgattgtacatcctgcagtccgcaagaagatgctcgctgagaaagaagctcatatccgctcaggcgccaagacggttgtgctggatatcccgctgctgttcgaatccggattgtggcattgggtcgacaaagtgctcgtggtgtacgtcgatgatgatgttcagttacgccgccttatggcacgtaacgggtttaccgaagaagaagctctggcccgcattcgttcacagtggcccatggccgagaaagttaaacgtgcagacgctgtaatcgacaataatggcacgattgaagaaacccgccgccagctgctggccattttacaccagtgggatgcactgggtaagggtggctccggccaccatcatcaccatcac

SEQ ID NO: 314 - protein, 211 aa, synthetic construct
  REGION 1..211: note = Variant of 3'O-kinase
MAFTIGLTGGIASGKSTVSAMMRELGLPVIDADEAARAVVRPGEEAYRQIVAAFGPGILRADGEIDRAKLGRIVFADEQQRKVLNAIVHPAVRKKMLAEKEAHIRSGAKTVVLDIPLLFESGLWHWVDKVLVVYVDDDVQLRRLMARNGFTEEEALARIRSQWPMAEKVKRADAVIDNNGTIEETRRQLLAILHQWDALGKGGSGHHHHHH

SEQ ID NO: 315 - DNA, 633 bp, synthetic construct
  misc_feature 1..633: note = Variant of 3'O-kinase
  source 1..633: mol_type = other DNA
atggcgtttaccattggtttaacaggagggatcgcagcgggcaaatcgactgtgagtgccatgatgcgtgaactgggtctgccggtcatcgatgctgacgaggcagcacgcgccgttgttcgtccaggcgaagaagcttatcgccagattgtagctgcgttcggtccgggcattcttcgtgccgatggcgagatcgatcgcgccaaattgggtgctatcgtgtttgctgacgaacaacaacgtaaggtgctgaatgcgattgtacatcctgcagtccgcaagaagatgctcgctgagaaagaagctcatatccgctcaggcgccaagacggttgtgctggatatcccgctgctgttcgaatccggattgacccattgggtcgacaaagtgctcgtggtgtacgtcgatgatgatgttcagttacgccgccttatggcacgtaacgggtttaccgaagaagaagctctggcccgcattcgttcacagtggcccatggccgagaaagttaaacgtgcagacgctgtaatcgacaataatggcacgattgaagaaacccgccgccagctgctggccattttacaccagtgggatgcactgggtaagggtggctccggccaccatcatcaccatcac

SEQ ID NO: 316 - protein, 211 aa, synthetic construct
  REGION 1..211: note = Variant of 3'O-kinase
MAFTIGLTGGIAAGKSTVSAMMRELGLPVIDADEAARAVVRPGEEAYRQIVAAFGPGILRADGEIDRAKLGAIVFADEQQRKVLNAIVHPAVRKKMLAEKEAHIRSGAKTVVLDIPLLFESGLTHWVDKVLVVYVDDDVQLRRLMARNGFTEEEALARIRSQWPMAEKVKRADAVIDNNGTIEETRRQLLAILHQWDALGKGGSGHHHHHH

SEQ ID NO: 317 - DNA, 633 bp, synthetic construct
  misc_feature 1..633: note = Variant of 3'O-kinase
  source 1..633: mol_type = other DNA
atggcgtttaccattggtttaacaggagggatcgcaagcggcaaatcgactgtgagtgccatgatgcgtgaactgggtctgccggtcatcgatgctgacgaggcagcacgcgccgttgttcgtccaggcgaagaagcttatcgccagattgtagctgcgttcggtccgggcattcttcgtgccgatggcgagatcgatcgcgccaaattgggtgctatcgtgtttaacgacgaacaacaacgtaaggtgctgaatgcgattgtacatcctgcagtccgcaagaagatgctcgctgagaaagaagctcatatccgctcaggcgccaagacggttgtgctggatatcccgctgctgttcgaatccggattgtggcattgggtcgacaaagtgctcgtggtgtacgtcgatgatgatgttcagttacgccgccttatggcacgtaacgggtttaccgaagaagaagctatggcccgcattcgttcacagtggcccatggccgagaaagttaaacgtgcagacgctgtaatcgacaataatggcacgattgaagaaacccgccgccagctgctggccattttacaccagtgggatgcactgggtaagggtggctccggccaccatcatcaccatcac

SEQ ID NO: 318 - protein, 211 aa, synthetic construct
  REGION 1..211: note = Variant of 3'O-kinase
MAFTIGLTGGIASGKSTVSAMMRELGLPVIDADEAARAVVRPGEEAYRQIVAAFGPGILRADGEIDRAKLGAIVFNDEQQRKVLNAIVHPAVRKKMLAEKEAHIRSGAKTVVLDIPLLFESGLWHWVDKVLVVYVDDDVQLRRLMARNGFTEEEAMARIRSQWPMAEKVKRADAVIDNNGTIEETRRQLLAILHQWDALGKGGSGHHHHHH

SEQ ID NO: 319 - DNA, 633 bp, synthetic construct
  misc_feature 1..633: note = Variant of 3'O-kinase
  source 1..633: mol_type = other DNA
atggcgtttaccattggtttaacaggagggatcgcagcgggcaaatcgactgtgagtgccatgatgcgtgaactgggtctgccggtcatcgatgctgacgaggcagcccgcgaagtggtgcgtccaggcgaagaagcttatcgccagattgtagctgcgttcggtccgggcattcttcgtgccgatggcgagatcgatcgcgccaaattgggtcgtatcgtgtttaacgacgaacaacaacgtaaggtgctgaatgcgattgtacatcctgcagtccgcaagaagatgctcgctgagaaagaagctcatatccgctcaggcgccaagacggttgtgctggatatcccgctgctgttcgaatccggattgacccattgggtcgacaaagtgctcgtggtgtacgtcgatgatgatgttcagttacgccgccttatggcacgtaacgggtttaccgaagaagaagctatggcccgcattcgttcacagtggcccatggccgagaaagttaaacgtgcagacgctgtaatcgacaataatggcacgattgaagaaacccgccgccagctgctggccattttacaccagtgggatgcactgggtaagggtggctccggccaccatcatcaccatcac

SEQ ID NO: 320 - protein, 211 aa, synthetic construct
  REGION 1..211: note = Variant of 3'O-kinase
MAFTIGLTGGIAAGKSTVSAMMRELGLPVIDADEAAREVVRPGEEAYRQIVAAFGPGILRADGEIDRAKLGRIVFNDEQQRKVLNAIVHPAVRKKMLAEKEAHIRSGAKTVVLDIPLLFESGLTHWVDKVLVVYVDDDVQLRRLMARNGFTEEEAMARIRSQWPMAEKVKRADAVIDNNGTIEETRRQLLAILHQWDALGKGGSGHHHHHH

SEQ ID NO: 321 - DNA, 633 bp, synthetic construct
  misc_feature 1..633: note = Variant of 3'O-kinase
  source 1..633: mol_type = other DNA
atggcgtttaccattggtttaacaggagggatcgcatcgggcaaatcgactgtgagtgccatgatgcgtgaactgggtctgccggtcatcgatgctgacgaggcagcacgcgccgttgttcgtccaggcgaagaagcttatcgccagattgtagctgcgttcggtccgggcattcttcgtgccgatggcgagatcgatcgcgccaaattgggtgctatcaagtttaacgacgaacaacaacgtaaggtgctgaatgcgattgtactgcctgcagtccgtaagaagatgctcgctgagaaagaagctcatatccgctcaggcgccaagacggttgtgctggatatcccgctgctgttcgaatccggattgacccattgggtcgacaaagtgctcgtggtgtacgtcgatgatgatgttcagttacgccgccttatggcacgtaacgggtttaccgaagaagaagctctggcccgcattcgttcacagtggcccatggccgagaaagttaaacgtgcagacgctgtaatcgacaataatggcacgattgaagaaacccgccgccagctgctggccattttacaccagtgggatgcactgggtaagggtggctccggccaccatcatcaccatcac

SEQ ID NO: 322 - protein, 211 aa, synthetic construct
  REGION 1..211: note = Variant of 3'O-kinase
MAFTIGLTGGIASGKSTVSAMMRELGLPVIDADEAARAVVRPGEEAYRQIVAAFGPGILRADGEIDRAKLGAIKFNDEQQRKVLNAIVLPAVRKKMLAEKEAHIRSGAKTVVLDIPLLFESGLTHWVDKVLVVYVDDDVQLRRLMARNGFTEEEALARIRSQWPMAEKVKRADAVIDNNGTIEETRRQLLAILHQWDALGKGGSGHHHHHH

SEQ ID NO: 323 - DNA, 633 bp, synthetic construct
  misc_feature 1..633: note = Variant of 3'O-kinase
  source 1..633: mol_type = other DNA
atggcgtttaccattggtttaacaggagggatcgcatcgggcaaatcgactgtgagtgccatgatgcgtgaactgggtctgccggtcatcgatgctgacgaggcagcacgcgccgttgttcgtccaggcgaagaagcttatcgccagattgtagctgcgttcggtccgggcattcttcgtgccgatggcgagatcgatcgcgccaaattgggtcgtatcaagtttgctgacgaacaacaacgtaaggtgctgaatgcgattgtacaccctgcagtccgtaagaagatgctcgctgagaaagaagctcatatccgctcaggcgccaagacggttgtgctggatatcccgctgctgttcgaatccggattggttcattgggtcgacaaagtgctcgtggtgtacgtcgatgatgatgttcagttacgccgccttatggcacgtaacgggtttaccgaagaagaagctctggcccgcattcgttcacagtggcccatggccgagaaagttaaacgtgcagacgctgtaatcgacaataatggcacgattgaagaaacccgccgccagctgctggccattttacaccagtgggatgcactgggtaagggtggctccggccaccatcatcaccatcac

SEQ ID NO: 324 - protein, 211 aa, synthetic construct
  REGION 1..211: note = Variant of 3'O-kinase
MAFTIGLTGGIASGKSTVSAMMRELGLPVIDADEAARAVVRPGEEAYRQIVAAFGPGILRADGEIDRAKLGRIKFADEQQRKVLNAIVHPAVRKKMLAEKEAHIRSGAKTVVLDIPLLFESGLVHWVDKVLVVYVDDDVQLRRLMARNGFTEEEALARIRSQWPMAEKVKRADAVIDNNGTIEETRRQLLAILHQWDALGKGGSGHHHHHH

SEQ ID NO: 325 - DNA, 633 bp, synthetic construct
  misc_feature 1..633: note = Variant of 3'O-kinase
  source 1..633: mol_type = other DNA
atggcgtttaccattggtttaacaggagggatcgcatcgggcaaatcgactgtgagtgccatgatgcgtgaactgggtctgccggtcatcgatgctgacgaggcagcccgcgaagtgatgcgtccaggcgaagaagcttatcgccagattgtagctgcgttcggtccgggcattcttcgtgccgatggcgagatcgatcgcgccaaattgggtgctatcgtgtttaacgacgaacaacaacgtaaggtgctgaatgcgattgtacaccctgcagtccgtaagaagatgctcgctgagaaagaagctcatatccgctcaggcgccaagacggttgtgctggatatcccgctgctgttcgaatccggattgactcattgggtcgacaaagtgctcgtggtgtacgtcgatgatgatgttcagttacgccgccttatggcacgtaacgggtttaccgaagaagaagctatggcccgcattcgttcacagtggcccatggccgagaaagttaaacgtgcagacgctgtaatcgacaataatggcacgattgaagaaacccgccgccagctgctggccattttacaccagtgggatgcactgggtaagggtggctccggccaccatcatcaccatcac

SEQ ID NO: 326 - protein, 211 aa, synthetic construct
  REGION 1..211: note = Variant of 3'O-kinase
MAFTIGLTGGIASGKSTVSAMMRELGLPVIDADEAAREVMRPGEEAYRQIVAAFGPGILRADGEIDRAKLGAIVFNDEQQRKVLNAIVHPAVRKKMLAEKEAHIRSGAKTVVLDIPLLFESGLTHWVDKVLVVYVDDDVQLRRLMARNGFTEEEAMARIRSQWPMAEKVKRADAVIDNNGTIEETRRQLLAILHQWDALGKGGSGHHHHHH

SEQ ID NO: 327 - DNA, 633 bp, synthetic construct
  misc_feature 1..633: note = Variant of 3'O-kinase
  source 1..633: mol_type = other DNA
atggcgtttaccattggtttaacaggagggatcgcatcgggcaaatcgactgtgagtgccatgatgcgtgaactgggtctgccggtcatcgatgctgacgaggcagcacgcgccgttgttcgtccaggcgaagaagcttatcgccagattgtagctgcgttcggtccgggcattcttcgtgccgatggcgagatcgatcgcgccaaattgggtcgtatcaagtttaacgacgaacaacaacgtaaggtgctgaatgcgattgtacaccctgcagtctataagaagatgctcgctgagaaagaagctcatatccgctcaggcgccaagacggttgtgctggatatcccgctgctgttcgaatccggattggttcattgggtcgacaaagtgctcgtggtgtacgtcgatgatgatgttcagttacgccgccttatggcacgtaacgggtttaccgaagaagaagctctggcccgcattcgttcacagtggcccatggccgagaaagttaaacgtgcagacgctgtaatcgacaataatggcacgattgaagaaacccgccgccagctgctggccattttacaccagtgggatgcactgggtaagggtggctccggccaccatcatcaccatcac

SEQ ID NO: 328 - protein, 211 aa, synthetic construct
  REGION 1..211: note = Variant of 3'O-kinase
MAFTIGLTGGIASGKSTVSAMMRELGLPVIDADEAARAVVRPGEEAYRQIVAAFGPGILRADGEIDRAKLGRIKFNDEQQRKVLNAIVHPAVYKKMLAEKEAHIRSGAKTVVLDIPLLFESGLVHWVDKVLVVYVDDDVQLRRLMARNGFTEEEALARIRSQWPMAEKVKRADAVIDNNGTIEETRRQLLAILHQWDALGKGGSGHHHHHH

SEQ ID NO: 329 - DNA, 633 bp, synthetic construct
  misc_feature 1..633: note = Variant of 3'O-kinase
  source 1..633: mol_type = other DNA
atggcgtttaccattggtttaacaggagggatcgcatcgggcaaatcgactgtgagtgccatgatgcgtgaactgggtctgccggtcatcgatgctgacgaggcagcacgcgccgttgttcgtccaggcgaagaagcttatcgccagattgtagctgcgttcggtccgggcattcttcgtgccgatggcgagatcgatcgcgccaaattgggtcgtatcgtgtttgctgacgaacaacaacgtaaggtgctgaatgcgattgtacatcctgcagtccgcaagaagatgctcgctgagaaagaagctcatatccgctcaggcgccaagacggttgtgctggatatcccgctgctgttcgaatccggattgacccattgggtcgacaaagtgctcgtggtgtacgtcgatgatgatgttcagttacgccgccttatggcacgtaacgggtttaccgaagaagaagctctggcccgcattcgttcacagtggcccatggccgagaaagttaaacgtgcagacgctgtaatcgacaataatggcacgattgaagaaacccgccgccagctgctggccattttacaccagtgggatgcactgggtaagggtggctccggccaccatcatcaccatcac

SEQ ID NO: 330 - protein, 211 aa, synthetic construct
  REGION 1..211: note = Variant of 3'O-kinase
MAFTIGLTGGIASGKSTVSAMMRELGLPVIDADEAARAVVRPGEEAYRQIVAAFGPGILRADGEIDRAKLGRIVFADEQQRKVLNAIVHPAVRKKMLAEKEAHIRSGAKTVVLDIPLLFESGLTHWVDKVLVVYVDDDVQLRRLMARNGFTEEEALARIRSQWPMAEKVKRADAVIDNNGTIEETRRQLLAILHQWDALGKGGSGHHHHHH

SEQ ID NO: 331 - DNA, 633 bp, synthetic construct
  misc_feature 1..633: note = Variant of 3'O-kinase
  source 1..633: mol_type = other DNA
atggcgtttaccattggtttaacaggagggatcgcagcgggcaaatcgactgtgagtgccatgatgcgtgaactgggtctgccggtcatcgatgctgacgaggcagcacgcgccgttgttcgtccaggcgaagaagcttatcgccagattgtagctgcgttcggtccgggcattcttcgtgccgatggcgagatcgatcgcgccaaattgggtgctatcgtgtttaacgacgaacaacaacgtaaggtgctgaatgcgattgtaagtcctgcagtccgtaagaagatgctcgctgagaaagaagctcatatccgctcaggcgccaagacggttgtgctggatatcccgctgctgttcgaatccggattgactcattgggtcgacaaagtgctcgtggtgtacgtcgatgatgatgttcagttacgccgccttatggcacgtaacgggtttaccgaagaagaagctctggcccgcattcgttcacagtggcccagtgccgagaaagttaaacgtgcagacgctgtaatcgacaataatggcacgattgaagaaacccgccgccagctgctggccattttacaccagtgggatgcactgggtaagggtggctccggccaccatcatcaccatcac

SEQ ID NO: 332 - protein, 211 aa, synthetic construct
  REGION 1..211: note = Variant of 3'O-kinase
MAFTIGLTGGIAAGKSTVSAMMRELGLPVIDADEAARAVVRPGEEAYRQIVAAFGPGILRADGEIDRAKLGAIVFNDEQQRKVLNAIVSPAVRKKMLAEKEAHIRSGAKTVVLDIPLLFESGLTHWVDKVLVVYVDDDVQLRRLMARNGFTEEEALARIRSQWPSAEKVKRADAVIDNNGTIEETRRQLLAILHQWDALGKGGSGHHHHHH

SEQ ID NO: 333 - DNA, 633 bp, synthetic construct
  misc_feature 1..633: note = Variant of 3'O-kinase
  source 1..633: mol_type = other DNA
atggcgtttaccattggtttaacaggagggatcgcagtaggcaaatcgactgtgagtgccatgatgcgtgaactgggtctgccggtcatcgatgctgacgaggcagcacgcgccgttgttcgtccaggcgaagaagcttatcgccagattgtagctgcgttcggtccgggcattcttcgtgccgatggcgagatcgatcgcgccaaattgggtgctatcgtgtttgctgacgaacaacaacgtaaggtgctgaatgcgattgtacatcctgcagtccgcaagaagatgctcgctgagaaagaagctcatatccgctcaggcgccaagacggttgtgctggatatcccgctgctgttcgaatccggattgactcattgggtcgacaaagtgctcgtggtgtacgtcgatgatgatgttcagttacgccgccttatggcacgtaacgggtttaccgaagaagaagctctggcccgcattcgttcacagtggcccatggccgagaaagttaaacgtgcagacgctgtaatcgacaataatggcacgattgaagaaacccgccgccagctgctggccattttacaccagtgggatgcactgggtaagggtggctccggccaccatcatcaccatcac

SEQ ID NO: 334 - protein, 211 aa, synthetic construct
  REGION 1..211: note = Variant of 3'O-kinase
MAFTIGLTGGIAVGKSTVSAMMRELGLPVIDADEAARAVVRPGEEAYRQIVAAFGPGILRADGEIDRAKLGAIVFADEQQRKVLNAIVHPAVRKKMLAEKEAHIRSGAKTVVLDIPLLFESGLTHWVDKVLVVYVDDDVQLRRLMARNGFTEEEALARIRSQWPMAEKVKRADAVIDNNGTIEETRRQLLAILHQWDALGKGGSGHHHHHH

SEQ ID NO: 335 - DNA, 633 bp, synthetic construct
  misc_feature 1..633: note = Variant of 3'O-kinase
  source 1..633: mol_type = other DNA
atggcgtttaccattggtttaacaggagggatcgcagtaggcaaatcgactgtgagtgccatgatgcgtgaactgggtctgccggtcatcgatgctgacgaggcagcacgcgccgttgttcgtccaggcgaagaagcttatcgccagattgtagctgcgttcggtccgggcattcttcgtgccgatggcgagatcgatcgcgccaaattgggtgctatcgtgtttaacgacgaacaacaacgtaaggtgctgaatgcgattgtaggtcctgcagtccgtaagaagatgctcgctgagaaagaagctcatatccgctcaggcgccaagacggttgtgctggatatcccgctgctgttcgaatccggattgacccattgggtcgacaaagtgctcgtggtgtacgtcgatgatgatgttcagttacgccgccttatggcacgtaacgggtttaccgaagaagaagctctggcccgcattcgttcacagtggcccatggccgagaaagttaaacgtgcagacgctgtaatcgacaataatggcacgattgaagaaacccgccgccagctgctggccattttacaccagtgggatgcactgggtaagggtggctccggccaccatcatcaccatcac

SEQ ID NO: 336 - protein, 211 aa, synthetic construct
  REGION 1..211: note = Variant of 3'O-kinase
MAFTIGLTGGIAVGKSTVSAMMRELGLPVIDADEAARAVVRPGEEAYRQIVAAFGPGILRADGEIDRAKLGAIVFNDEQQRKVLNAIVGPAVRKKMLAEKEAHIRSGAKTVVLDIPLLFESGLTHWVDKVLVVYVDDDVQLRRLMARNGFTEEEALARIRSQWPMAEKVKRADAVIDNNGTIEETRRQLLAILHQWDALGKGGSGHHHHHH

SEQ ID NO: 337 - DNA, 633 bp, synthetic construct
  misc_feature 1..633: note = Variant of 3'O-kinase
  source 1..633: mol_type = other DNA
atggcgtttaccattggtttaacaggagggatcgcatcgggcaaatcgactgtgagtgccatgatgcgtgaactgggtctgccggtcatcgatgctgacgaggcagcccgcgaactggtgcgtccaggcgaagaagcttatcgccagattgtagctgcgttcggtccgggcattcttcgtgccgatggcgagatcgatcgcgccaaattgggtgctatcgtgtttgctgacgaacaacaacgtaaggtgctgaatgcgattgtacatcctgcagtccgcaagaagatgctcgctgagaaagaagctcatatccgctcaggcgccaagacggttgtgctggatatcccgctgctgttcgaatccggattgactcattgggtcgacaaagtgctcgtggtgtacgtcgatgatgatgttcagttacgccgccttatggcacgtaacgggtttaccgaagaagaagctctggcccgcattcgttcacagtggcccatggccgagaaagttaaacgtgcagacgctgtaatcgacaataatggcacgattgaagaaacccgccgccagctgctggccattttacaccagtgggatgcactgggtaagggtggctccggccaccatcatcaccatcac

SEQ ID NO: 338 - protein, 211 aa, synthetic construct
  REGION 1..211: note = Variant of 3'O-kinase
MAFTIGLTGGIASGKSTVSAMMRELGLPVIDADEAARELVRPGEEAYRQIVAAFGPGILRADGEIDRAKLGAIVFADEQQRKVLNAIVHPAVRKKMLAEKEAHIRSGAKTVVLDIPLLFESGLTHWVDKVLVVYVDDDVQLRRLMARNGFTEEEALARIRSQWPMAEKVKRADAVIDNNGTIEETRRQLLAILHQWDALGKGGSGHHHHHH

SEQ ID NO: 339 - DNA, 633 bp, synthetic construct
  misc_feature 1..633: note = Variant of 3'O-kinase
  source 1..633: mol_type = other DNA
atggcgtttaccattggtttaacaggagggatcgcagtaggcaaatcgactgtgagtgccatgatgcgtgaactgggtctgccggtcatcgatgctgacgaggcagcacgcgccgttgttcgtccaggcgaagaagcttatcgccagattgtagctgcgttcggtccgggcattcttcgtgccgatggcgagatcgatcgcgccaaattgggtgctatcgtgtttaacgacgaacaacaacgtaaggtgctgaatgcgattgtacatcctgcagtccgcaagaagatgctcgctgagaaagaagctcatatccgctcaggcgccaagacggttgtgctggatatcccgctgctgttcgaatccggattgtggcattgggtcgacaaagtgctcgtggtgtacgtcgatgatgatgttcagttacgccgccttatggcacgtaacgggtttaccgaagaagaagctctggcccgcattcgttcacagtggcccatggccgagaaagttaaacgtgcagacgctgtaatcgacaataatggcacgattgaagaaacccgccgccagctgctggccattttacaccagtgggatgcactgggtaagggtggctccggccaccatcatcaccatcac

SEQ ID NO: 340 - protein, 211 aa, synthetic construct
  REGION 1..211: note = Variant of 3'O-kinase
MAFTIGLTGGIAVGKSTVSAMMRELGLPVIDADEAARAVVRPGEEAYRQIVAAFGPGILRADGEIDRAKLGAIVFNDEQQRKVLNAIVHPAVRKKMLAEKEAHIRSGAKTVVLDIPLLFESGLWHWVDKVLVVYVDDDVQLRRLMARNGFTEEEALARIRSQWPMAEKVKRADAVIDNNGTIEETRRQLLAILHQWDALGKGGSGHHHHHH

SEQ ID NO: 341 - DNA, 633 bp, synthetic construct
  misc_feature 1..633: note = Variant of 3'O-kinase
  source 1..633: mol_type = other DNA
atggcgtttaccattggtttaacaggagggatcgcagtaggcaaatcgactgtgagtgccatgatgcgtgaactgggtctgccggtcatcgatgctgacgaggcaacccgcgaagtgatgcgtccaggcgaagaagcttatcgccagattgtagctgcgttcggtccgggcattcttcgtgccgatggcgagatcgatcgcgccaaattgggtcgtatcaagtttaacgacgaacaacaacgtaaggtgctgaatgcgattgtacaccctgcagtccgtaagaagatgctcgctgagaaagaagctcatatccgctcaggcgccaagacggttgtgctggatatcccgctgctgttcgaatccggattgacccattgggtcgacaaagtgctcgtggtgtacgtcgatgatgatgttcagttacgccgccttatggcacgtaacgggtttaccgaagaagaagctctggcccgcattcgttcacagtggcccatggccgagaaagttaaacgtgcagacgctgtaatcgacaataatggcacgattgaagaaacccgccgccagctgctggccattttacaccagtgggatgcactgggtaagggtggctccggccaccatcatcaccatcac

SEQ ID NO: 342 - protein, 211 aa, synthetic construct
  REGION 1..211: note = Variant of 3'O-kinase
MAFTIGLTGGIAVGKSTVSAMMRELGLPVIDADEATREVMRPGEEAYRQIVAAFGPGILRADGEIDRAKLGRIKFNDEQQRKVLNAIVHPAVRKKMLAEKEAHIRSGAKTVVLDIPLLFESGLTHWVDKVLVVYVDDDVQLRRLMARNGFTEEEALARIRSQWPMAEKVKRADAVIDNNGTIEETRRQLLAILHQWDALGKGGSGHHHHHH

SEQ ID NO: 343 - DNA, 633 bp, synthetic construct
  misc_feature 1..633: note = Variant of 3'O-kinase
  source 1..633: mol_type = other DNA
atggcgtttaccattggtttaacaggagggatcgcatcgggcaaatcgactgtgagtgccatgatgcgtgaactgggtctgccggtcatcgatgctgacgaggcagcacgcgccgttgttcgtccaggcgaagaagcttatcgccagattgtagctgcgttcggtccgggcattcttcgtgccgatggcgagatcgatcgcgccaaattgggtcgtatcaagtttaacgacgaacaacaacgtaaggtgctgaatgcgattgtaggtcctgcagtccgtaagaagatgctcgctgagaaagaagctcatatccgctcaggcgccaagacggttgtgctggatatcccgctgctgttcgaatccggattgactcattgggtcgacaaagtgctcgtggtgtacgtcgatgatgatgttcagttacgccgccttatggcacgtaacgggtttaccgaagaagaagctctggcccgcattcgttcacagtggcccatggccgagaaagttaaacgtgcagacgctgtaatcgacaataatggcacgattgaagaaacccgccgccagctgctggccattttacaccagtgggatgcactgggtaagggtggctccggccaccatcatcaccatcac

SEQ ID NO: 344 - protein, 211 aa, synthetic construct
  REGION 1..211: note = Variant of 3'O-kinase
MAFTIGLTGGIASGKSTVSAMMRELGLPVIDADEAARAVVRPGEEAYRQIVAAFGPGILRADGEIDRAKLGRIKFNDEQQRKVLNAIVGPAVRKKMLAEKEAHIRSGAKTVVLDIPLLFESGLTHWVDKVLVVYVDDDVQLRRLMARNGFTEEEALARIRSQWPMAEKVKRADAVIDNNGTIEETRRQLLAILHQWDALGKGGSGHHHHHH

SEQ ID NO: 345 - DNA, 633 bp, synthetic construct
  misc_feature 1..633: note = Variant of 3'O-kinase
  source 1..633: mol_type = other DNA
atggcgtttaccattggtttaacaggagggatcgcatcgggcaaatcgactgtgagtgccatgatgcgtgaactgggtctgccggtcatcgatgctgacgaggcagcccgcgaactgatgcgtccaggcgaagaagcttatcgccagattgtagctgcgttcggtccgggcattcttcgtgccgatggcgagatcgatcgcgccaaattgggtcgtatcaagtttgctgacgaacaacaacgtaaggtgctgaatgcgattgtaagtcctgcagtccgtaagaagatgctcgctgagaaagaagctcatatccgctcaggcgccaagacggttgtgctggatatcccgctgctgttcgaatccggattgactcattgggtcgacaaagtgctcgtggtgtacgtcgatgatgatgttcagttacgccgccttatggcacgtaacgggtttaccgaagaagaagctctggcccgcattcgttcacagtggcccatggccgagaaagttaaacgtgcagacgctgtaatcgacaataatggcacgattgaagaaacccgccgccagctgctggccattttacaccagtgggatgcactgggtaagggtggctccggccaccatcatcaccatcac

SEQ ID NO: 346 - protein, 211 aa, synthetic construct
  REGION 1..211: note = Variant of 3'O-kinase
MAFTIGLTGGIASGKSTVSAMMRELGLPVIDADEAARELMRPGEEAYRQIVAAFGPGILRADGEIDRAKLGRIKFADEQQRKVLNAIVSPAVRKKMLAEKEAHIRSGAKTVVLDIPLLFESGLTHWVDKVLVVYVDDDVQLRRLMARNGFTEEEALARIRSQWPMAEKVKRADAVIDNNGTIEETRRQLLAILHQWDALGKGGSGHHHHHH

SEQ ID NO: 347 - DNA, 633 bp, synthetic construct
  misc_feature 1..633: note = Variant of 3'O-kinase
  source 1..633: mol_type = other DNA
atggcgtttaccattggtttaacaggagggatcgcagtaggcaaatcgactgtgagtgccatgatgcgtgaactgggtctgccggtcatcgatgctgacgaggcagcacgcgccgttgttcgtccaggcgaagaagcttatcgccagattgtagctgcgttcggtccgggcattcttcgtgccgatggcgagatcgatcgcgccaaattgggtcgtatcgtgtttaacgacgaacaacaacgtaaggtgctgaatgcgattgtactgcctgcagtccgtaagaagatgctcgctgagaaagaagctcatatccgctcaggcgccaagacggttgtgctggatatcccgctgctgttcgaatccggattggttcattgggtcgacaaagtgctcgtggtgtacgtcgatgatgatgttcagttacgccgccttatggcacgtaacgggtttaccgaagaagaagctctggcccgcattcgttcacagtggcccagtgccgagaaagttaaacgtgcagacgctgtaatcgacaataatggcacgattgaagaaacccgccgccagctgctggccattttacaccagtgggatgcactgggtaagggtggctccggccaccatcatcaccatcac

SEQ ID NO: 348 - protein, 211 aa, synthetic construct
  REGION 1..211: note = Variant of 3'O-kinase
MAFTIGLTGGIAVGKSTVSAMMRELGLPVIDADEAARAVVRPGEEAYRQIVAAFGPGILRADGEIDRAKLGRIVFNDEQQRKVLNAIVLPAVRKKMLAEKEAHIRSGAKTVVLDIPLLFESGLVHWVDKVLVVYVDDDVQLRRLMARNGFTEEEALARIRSQWPSAEKVKRADAVIDNNGTIEETRRQLLAILHQWDALGKGGSGHHHHHH

SEQ ID NO: 349 - DNA, 633 bp, synthetic construct
  misc_feature 1..633: note = Variant of 3'O-kinase
  source 1..633: mol_type = other DNA
atggcgtttaccattggtttaacaggagggatcgcagcgggcaaatcgactgtgagtgccatgatgcgtgaactgggtctgccggtcatcgatgctgacgaggcagcacgcgccgttgttcgtccaggcgaagaagcttatcgccagattgtagctgcgttcggtccgggcattcttcgtgccgatggcgagatcgatcgcgccaaattgggtgctatcgtgtttgctgacgaacaacaacgtaaggtgctgaatgcgattgtacatcctgcagtccgcaagaagatgctcgctgagaaagaagctcatatccgctcaggcgccaagacggttgtgctggatatcccgctgctgttcgaatccggattgtggcattgggtcgacaaagtgctcgtggtgtacgtcgatgatgatgttcagttacgccgccttatggcacgtaacgggtttaccgaagaagaagctctggcccgcattcgttcacagtggcccatggccgagaaagttaaacgtgcagacgctgtaatcgacaataatggcacgattgaagaaacccgccgccagctgctggccattttacaccagtgggatgcactgggtaagggtggctccggccaccatcatcaccatcac

SEQ ID NO: 350 - protein, 211 aa, synthetic construct
  REGION 1..211: note = Variant of 3'O-kinase
MAFTIGLTGGIAAGKSTVSAMMRELGLPVIDADEAARAVVRPGEEAYRQIVAAFGPGILRADGEIDRAKLGAIVFADEQQRKVLNAIVHPAVRKKMLAEKEAHIRSGAKTVVLDIPLLFESGLWHWVDKVLVVYVDDDVQLRRLMARNGFTEEEALARIRSQWPMAEKVKRADAVIDNNGTIEETRRQLLAILHQWDALGKGGSGHHHHHH

SEQ ID NO: 351 - DNA, 633 bp, synthetic construct
  misc_feature 1..633: note = Variant of 3'O-kinase
  source 1..633: mol_type = other DNA
atggcgtttaccattggtttaacaggagggatcgcagtaggcaaatcgactgtgagtgccatgatgcgtgaactgggtctgccggtcatcgatgctgacgaggcagcacgcgccgttgttcgtccaggcgaagaagcttatcgccagattgtagctgcgttcggtccgggcattcttcgtgccgatggcgagatcgatcgcgccaaattgggtcgtatcaagtttaacgacgaacaacaacgtaaggtgctgaatgcgattgtactgcctgcagtctataagaagatgctcgctgagaaagaagctcatatccgctcaggcgccaagacggttgtgctggatatcccgctgctgttcgaatccggattgtggcattgggtcgacaaagtgctcgtggtgtacgtcgatgatgatgttcagttacgccgccttatggcacgtaacgggtttaccgaagaagaagctctggcccgcattcgttcacagtggcccatggccgagaaagttaaacgtgcagacgctgtaatcgacaataatggcacgattgaagaaacccgccgccagctgctggccattttacaccagtgggatgcactgggtaagggtggctccggccaccatcatcaccatcac

SEQ ID NO: 352 - protein, 211 aa, synthetic construct
  REGION 1..211: note = Variant of 3'O-kinase
MAFTIGLTGGIAVGKSTVSAMMRELGLPVIDADEAARAVVRPGEEAYRQIVAAFGPGILRADGEIDRAKLGRIKFNDEQQRKVLNAIVLPAVYKKMLAEKEAHIRSGAKTVVLDIPLLFESGLWHWVDKVLVVYVDDDVQLRRLMARNGFTEEEALARIRSQWPMAEKVKRADAVIDNNGTIEETRRQLLAILHQWDALGKGGSGHHHHHH

SEQ ID NO: 353 - DNA, 633 bp, synthetic construct
  misc_feature 1..633: note = Variant of 3'O-kinase
  source 1..633: mol_type = other DNA
atggcgtttaccattggtttaacaggagggatcgcatcgggcaaatcgactgtgagtgccatgatgcgtgaactgggtctgccggtcatcgatgctgacgaggcagcacgcgccgttgttcgtccaggcgaagaagcttatcgccagattgtagctgcgttcggtccgggcattcttcgtgccgatggcgagatcgatcgcgccaaattgggtgctatcaagtttgctgacgaacaacaacgtaaggtgctgaatgcgattgtaggtcctgcagtccgtaagaagatgctcgctgagaaagaagctcatatccgctcaggcgccaagacggttgtgctggatatcccgctgctgttcgaatccggattggttcattgggtcgacaaagtgctcgtggtgtacgtcgatgatgatgttcagttacgccgccttatggcacgtaacgggtttaccgaagaagaagctctggcccgcattcgttcacagtggcccatggccgagaaagttaaacgtgcagacgctgtaatcgacaataatggcacgattgaagaaacccgccgccagctgctggccattttacaccagtgggatgcactgggtaagggtggctccggccaccatcatcaccatcac

SEQ ID NO: 354 - protein, 211 aa, synthetic construct
  REGION 1..211: note = Variant of 3'O-kinase
MAFTIGLTGGIASGKSTVSAMMRELGLPVIDADEAARAVVRPGEEAYRQIVAAFGPGILRADGEIDRAKLGAIKFADEQQRKVLNAIVGPAVRKKMLAEKEAHIRSGAKTVVLDIPLLFESGLVHWVDKVLVVYVDDDVQLRRLMARNGFTEEEALARIRSQWPMAEKVKRADAVIDNNGTIEETRRQLLAILHQWDALGKGGSGHHHHHH

SEQ ID NO: 355 - DNA, 633 bp, synthetic construct
  misc_feature 1..633: note = Variant of 3'O-kinase
  source 1..633: mol_type = other DNA
atggcgtttaccattggtttaacaggagggatcgcagtaggcaaatcgactgtgagtgccatgatgcgtgaactgggtctgccggtcatcgatgctgacgaggcagcacgcgccgttgttcgtccaggcgaagaagcttatcgccagattgtagctgcgttcggtccgggcattcttcgtgccgatggcgagatcgatcgcgccaaattgggtgctatcgtgtttaacgacgaacaacaacgtaaggtgctgaatgcgattgtaagtcctgcagtccgtaagaagatgctcgctgagaaagaagctcatatccgctcaggcgccaagacggttgtgctggatatcccgctgctgttcgaatccggattgacccattgggtcgacaaagtgctcgtggtgtacgtcgatgatgatgttcagttacgccgccttatggcacgtaacgggtttaccgaagaagaagctctggcccgcattcgttcacagtggcccatggccgagaaagttaaacgtgcagacgctgtaatcgacaataatggcacgattgaagaaacccgccgccagctgctggccattttacaccagtgggatgcactgggtaagggtggctccggccaccatcatcaccatcac

SEQ ID NO: 356 - protein, 211 aa, synthetic construct
  REGION 1..211: note = Variant of 3'O-kinase
MAFTIGLTGGIAVGKSTVSAMMRELGLPVIDADEAARAVVRPGEEAYRQIVAAFGPGILRADGEIDRAKLGAIVFNDEQQRKVLNAIVSPAVRKKMLAEKEAHIRSGAKTVVLDIPLLFESGLTHWVDKVLVVYVDDDVQLRRLMARNGFTEEEALARIRSQWPMAEKVKRADAVIDNNGTIEETRRQLLAILHQWDALGKGGSGHHHHHH

SEQ ID NO: 357 - DNA, 633 bp, synthetic construct
  misc_feature 1..633: note = Variant of 3'O-kinase
  source 1..633: mol_type = other DNA
atggcgtttaccattggtttaacaggagggatcgcagtaggcaaatcgactgtgagtgccatgatgcgtgaactgggtctgccggtcatcgatgctgacgaggcagcacgcgccgttgtgcgtccaggcgaagaagcttatcgccagattgtagctgcgttcggtccgggcattcttcgtgccgatggcgagatcgatcgcgccaaattgggtgctatcgtgtttgctgacgaacaacaacgtaaggtgctgaatgcgattgtaggtcctgcagtccgtaagaagatgctcgctgagaaagaagctcatatccgctcaggcgccaagacggttgtgctggatatcccgctgctgttcgaatccggattgactcattgggtcgacaaagtgctcgtggtgtacgtcgatgatgatgttcagttacgccgccttatggcacgtaacgggtttaccgaagaagaagctatggcccgcattcgttcacagtggcccagtgccgagaaagttaaacgtgcagacgctgtaatcgacaataatggcacgattgaagaaacccgccgccagctgctggccattttacaccagtgggatgcactgggtaagggtggctccggccaccatcatcaccatcac

SEQ ID NO: 358 - protein, 211 aa, synthetic construct
  REGION 1..211: note = Variant of 3'O-kinase
MAFTIGLTGGIAVGKSTVSAMMRELGLPVIDADEAARAVVRPGEEAYRQIVAAFGPGILRADGEIDRAKLGAIVFADEQQRKVLNAIVGPAVRKKMLAEKEAHIRSGAKTVVLDIPLLFESGLTHWVDKVLVVYVDDDVQLRRLMARNGFTEEEAMARIRSQWPSAEKVKRADAVIDNNGTIEETRRQLLAILHQWDALGKGGSGHHHHHH

SEQ ID NO: 359 - DNA, 633 bp, synthetic construct
  misc_feature 1..633: note = Variant of 3'O-kinase
  source 1..633: mol_type = other DNA
atggcgtttaccattggtttaacaggagggatcgcagtaggcaaatcgactgtgagtgccatgatgcgtgaactgggtctgccggtcatcgatgctgacgaggcagcacgcgccgttgttcgtccaggcgaagaagcttatcgccagattgtagctgcgttcggtccgggcattcttcgtgccgatggcgagatcgatcgcgccaaattgggtgctatcaagtttaacgacgaacaacaacgtaaggtgctgaatgcgattgtaagtcctgcagtctataagaagatgctcgctgagaaagaagctcatatccgctcaggcgccaagacggttgtgctggatatcccgctgctgttcgaatccggattgactcattgggtcgacaaagtgctcgtggtgtacgtcgatgatgatgttcagttacgccgccttatggcacgtaacgggtttaccgaagaagaagctctggcccgcattcgttcacagtggcccatggccgagaaagttaaacgtgcagacgctgtaatcgacaataatggcacgattgaagaaacccgccgccagctgctggccattttacaccagtgggatgcactgggtaagggtggctccggccaccatcatcaccatcac

SEQ ID NO: 360 - protein, 211 aa, synthetic construct
  REGION 1..211: note = Variant of 3'O-kinase
MAFTIGLTGGIAVGKSTVSAMMRELGLPVIDADEAARAVVRPGEEAYRQIVAAFGPGILRADGEIDRAKLGAIKFNDEQQRKVLNAIVSPAVYKKMLAEKEAHIRSGAKTVVLDIPLLFESGLTHWVDKVLVVYVDDDVQLRRLMARNGFTEEEALARIRSQWPMAEKVKRADAVIDNNGTIEETRRQLLAILHQWDALGKGGSGHHHHHH

SEQ ID NO: 361 - DNA, 633 bp, synthetic construct
  misc_feature 1..633: note = Variant of 3'O-kinase
  source 1..633: mol_type = other DNA
atggcgtttaccattggtttaacaggagggatcgcatcgggcaaatcgactgtgagtgccatgatgcgtgaactgggtctgccggtcatcgatgctgacgaggcagcccgcgaagtggtgcgtccaggcgaagaagcttatcgccagattgtagctgcgttcggtccgggcattcttcgtgccgatggcgagatcgatcgcgccaaattgggtgctatcgtgtttgctgacgaacaacaacgtaaggtgctgaatgcgattgtacatcctgcagtccgcaagaagatgctcgctgagaaagaagctcatatccgctcaggcgccaagacggttgtgctggatatcccgctgctgttcgaatccggattgacccattgggtcgacaaagtgctcgtggtgtacgtcgatgatgatgttcagttacgccgccttatggcacgtaacgggtttaccgaagaagaagctatggcccgcattcgttcacagtggcccatggccgagaaagttaaacgtgcagacgctgtaatcgacaataatggcacgattgaagaaacccgccgccagctgctggccattttacaccagtgggatgcactgggtaagggtggctccggccaccatcatcaccatcac

SEQ ID NO: 362 - protein, 211 aa, synthetic construct
  REGION 1..211: note = Variant of 3'O-kinase
MAFTIGLTGGIASGKSTVSAMMRELGLPVIDADEAAREVVRPGEEAYRQIVAAFGPGILRADGEIDRAKLGAIVFADEQQRKVLNAIVHPAVRKKMLAEKEAHIRSGAKTVVLDIPLLFESGLTHWVDKVLVVYVDDDVQLRRLMARNGFTEEEAMARIRSQWPMAEKVKRADAVIDNNGTIEETRRQLLAILHQWDALGKGGSGHHHHHH

SEQ ID NO: 363 - DNA, 633 bp, synthetic construct
  misc_feature 1..633: note = Variant of 3'O-kinase
  source 1..633: mol_type = other DNA
atggcgtttaccattggtttaacaggagggatcgcagtaggcaaatcgactgtgagtgccatgatgcgtgaactgggtctgccggtcatcgatgctgacgaggcaacccgcgaagtgatgcgtccaggcgaagaagcttatcgccagattgtagctgcgttcggtccgggcattcttcgtgccgatggcgagatcgatcgcgccaaattgggtcgtatcaagtttaacgacgaacaacaacgtaaggtgctgaatgcgattgtacaccctgcagtccgtaagaagatgctcgctgagaaagaagctcatatccgctcaggcgccaagacggttgtgctggatatcccgctgctgttcgaatccggattggttcattgggtcgacaaagtgctcgtggtgtacgtcgatgatgatgttcagttacgccgccttatggcacgtaacgggtttaccgaagaagaagctctggcccgcattcgttcacagtggcccatggccgagaaagttaaacgtgcagacgctgtaatcgacaataatggcacgattgaagaaacccgccgccagctgctggccattttacaccagtgggatgcactgggtaagggtggctccggccaccatcatcaccatcac

SEQ ID NO: 364 - protein, 211 aa, synthetic construct
  REGION 1..211: note = Variant of 3'O-kinase
MAFTIGLTGGIAVGKSTVSAMMRELGLPVIDADEATREVMRPGEEAYRQIVAAFGPGILRADGEIDRAKLGRIKFNDEQQRKVLNAIVHPAVRKKMLAEKEAHIRSGAKTVVLDIPLLFESGLVHWVDKVLVVYVDDDVQLRRLMARNGFTEEEALARIRSQWPMAEKVKRADAVIDNNGTIEETRRQLLAILHQWDALGKGGSGHHHHHH

SEQ ID NO: 365 - DNA, 633 bp, synthetic construct
  misc_feature 1..633: note = Variant of 3'O-kinase
  source 1..633: mol_type = other DNA
atggcgtttaccattggtttaacaggagggatcgcagtaggcaaatcgactgtgagtgccatgatgcgtgaactgggtctgccggtcatcgatgctgacgaggcaacccgcgaactgatgcgtccaggcgaagaagcttatcgccagattgtagctgcgttcggtccgggcattcttcgtgccgatggcgagatcgatcgcgccaaattgggtgctatcaagtttaacgacgaacaacaacgtaaggtgctgaatgcgattgtaggtcctgcagtccgtaagaagatgctcgctgagaaagaagctcatatccgctcaggcgccaagacggttgtgctggatatcccgctgctgttcgaatccggattgacccattgggtcgacaaagtgctcgtggtgtacgtcgatgatgatgttcagttacgccgccttatggcacgtaacgggtttaccgaagaagaagctctggcccgcattcgttcacagtggcccatggccgagaaagttaaacgtgcagacgctgtaatcgacaataatggcacgattgaagaaacccgccgccagctgctggccattttacaccagtgggatgcactgggtaagggtggctccggccaccatcatcaccatcac

SEQ ID NO: 366 - protein, 211 aa, synthetic construct
  REGION 1..211: note = Variant of 3'O-kinase
MAFTIGLTGGIAVGKSTVSAMMRELGLPVIDADEATRELMRPGEEAYRQIVAAFGPGILRADGEIDRAKLGAIKFNDEQQRKVLNAIVGPAVRKKMLAEKEAHIRSGAKTVVLDIPLLFESGLTHWVDKVLVVYVDDDVQLRRLMARNGFTEEEALARIRSQWPMAEKVKRADAVIDNNGTIEETRRQLLAILHQWDALGKGGSGHHHHHH

SEQ ID NO: 367 - DNA, 1587 bp, synthetic construct
  misc_feature 1..1587: note = Variant of terminal deoxynucleotidyl transferase
  source 1..1587: mol_type = other DNA
atgcaccatcatcatcatcatggcggtagcggcagccacggcattcgtaccatcgattcggacttcgggaagaaacagcagaaaaaaggcgataaccacgatagttccgccacttatgaaatcaaatttcacgagtttgtgctgttcattctcgaagaaaaaatgggtgcgacgcgtcgtacttttctgacagatttagcccgcaagaaagggttccgcgtcgagaatgaactgaccgacgaagttacccacatcgtggcagaaaatctgtcacgctctgaagtattggcttggctgaaagaacacaagatggagaagaccaagcaattcgaactgctggatattagctggcttatcgaaagcatgaaagttggtaaaccggtggacaccaaggggaaataccagttggcggaatcggttgaggtgagtgcgaacccagatccgacagaaggtcgtgtaaacgagctgcctcctactatgaaaaccgtttctccgtatgcgtgtcaacgccgcaccaccctgaacaaccgtaatcaacgttttacggactcgctggaaattcttcgtgaaaattacgagttcaaacgcaacgatgatactgcgctggaatttcgtcgtgctatctccgtgctgaaaagccttccgtttgaggtacgtagcctgaaagacacggaaggattgccctggatcggtgatgaagtcaaagggattatggaagaaatcatcgaggtcggggagtcgcgtgaagtgcaggccgtgctcaatgatgagtggtatcaaagcttccaccgctttaagagtgtctttggagtgggggtgaagacagcagacaagtggtaccgtatgggtctgcgcaccctcgaggatgttcgttccagcaagaccctgaagttgaccccgatgcagaaagtaggtctgctgtattatgaagatcttgctcgcggcgttacgcgtgccgaagctgacgcgatttggctgctggttcaggatgcagtcgcaactttcgacccggatgcgatcgtggagattgtcggtggatttcgtcgtgggaaacctcagggtcacgacgttgatctgcttatcagttctccgggagctgagaaagagcaagaagaccaactcctgcagaaagtgatgaatctgtggaagaaacaagggttgttgctgtacggtcgtctggaatggacccagtgggaagatgggggttcgccttccggtaaggctgacgagggtgacgcgggtgcgaaatgctttctgatcctcaaactttatgatcatctggtgcgtaaaagcaaatggaacatgccgacgggttcgaacgtgggcgagtccaaaccgtggaaagcaattcgcgtagatctgctgcgttgcccctatggcagttttgcgtttgcgatgttgcagtggaccggaagccgcatgttccgtcgtgatctgcgttggtacgccactgacgagaagaacatgatgctggacaatcattcgctgtatgacctgaccaagggtatcttcctccctgctaaatcggaagaggaaattttcgcacatctggggcttgaatacctggaaccgttcgaacgtaacgca

SEQ ID NO: 368 - protein, 529 aa, synthetic construct
  REGION 1..529: note = Variant of terminal deoxynucleotidyl transferase
MHHHHHHGGSGSHGIRTIDSDFGKKQQKKGDNHDSSATYEIKFHEFVLFILEEKMGATRRTFLTDLARKKGFRVENELTDEVTHIVAENLSRSEVLAWLKEHKMEKTKQFELLDISWLIESMKVGKPVDTKGKYQLAESVEVSANPDPTEGRVNELPPTMKTVSPYACQRRTTLNNRNQRFTDSLEILRENYEFKRNDDTALEFRRAISVLKSLPFEVRSLKDTEGLPWIGDEVKGIMEEIIEVGESREVQAVLNDEWYQSFHRFKSVFGVGVKTADKWYRMGLRTLEDVRSSKTLKLTPMQKVGLLYYEDLARGVTRAEADAIWLLVQDAVATFDPDAIVEIVGGFRRGKPQGHDVDLLISSPGAEKEQEDQLLQKVMNLWKKQGLLLYGRLEWTQWEDGGSPSGKADEGDAGAKCFLILKLYDHLVRKSKWNMPTGSNVGESKPWKAIRVDLLRCPYGSFAFAMLQWTGSRMFRRDLRWYATDEKNMMLDNHSLYDLTKGIFLPAKSEEEIFAHLGLEYLEPFERNA

SEQ ID NO: 369 - DNA, 1587 bp, synthetic construct
  misc_feature 1..1587: note = Variant of terminal deoxynucleotidyl transferase
  source 1..1587: mol_type = other DNA
atgcaccatcatcatcatcatggcggtagcggcagccacggcattcgtaccatcgattcggacttcgggaagaaacagcagaaaaaaggcgataaccacgatagttccgccacttatgaaatcaaatttcacgagtttgtgctgttcattctcgaagaaaaaatgggtgcgacgcgtcgtacttttctgacagatttagcccgcaagaaagggttccgcgtcgagaatgaactgaccgacgaagttacccacatcgtggcagaaaatctgtcacgctctgaagtattggcttggctgaaagaacacaagatggagaagaccaagcaattcgaactgctggatattagctggcttatcgaaagcatgaaagttggtaaaccggtggacaccaaggggaaataccagttggcggaatcggttgaggtgagtgcgaacccagatccgacagaaggtcgtgtaaacgagctgcctcctactatgaaaaccgtttctccgtatgcgtgtcaacgccgcaccaccctgaacaaccgtaatcaacgttttacggactcgctggagattcttcgtgaaaattacgagctgaaaggcaacgacgatactgcgctggaatttcgtcgtgctatctccgtgctgaaaagccttccgtttgaggtacgtagcctgaaagacacggaaggattgccctggatcagtgatgaagtcaaagggattatggaagaaatcatcgaagtcggggagtcgcgtgaagtgcaggccgtgctcaatgatgagtggtatcaaagcttccacgcatttacgcgtgtctttggagtgggggtgaagacagcagacaagtggtaccgcatgggtctgcgcaccctcgaggatgttcgttccagcaagaccctgaagttgaccccgtggcagaaagtaggtctgctgtattatgaagatcttgctcgcggcgttacgcgtgcggaagctgacgcgatttggctgctggttcaggatgcagtcgcaactttcgacccggatgcgatcgtggagattgtcggtggacagcgtcgtgggaaacctcagggtcacgacgttgatctgcttatcagttctccgggagctgaaaaagagcaagaagaccaactcctgcagaaagtgatgaatctgtggaagaaacaagggttgttgctgtgtggtcgtctggaatggagtcagtgggaatgggggggtctgccgtccggtaaggctgatgagggtgacgcggaggcgtcgtgctttctgatcctcaaactttatgatcatctggtgcgtaaaagtaaacgcaatatgccgactggttcgaacatgggcgagtccaaaccgtggaaagcaattaaagtagatctgctgcgttgcccccgcggcagttttgcgtttgcgatgttgcagtggaccggaagccgcatgttccgtcgtgatctgcgcgattacgcccgcgaagagaagaacatgatgctggacaatcattcgctgtatgacatgactcgtggtatccaactccctgctaaatcggaagaggaaattttcgaacatctggggcttgaatacctggaaccgttcgaacgtaacgca

SEQ ID NO: 370 - protein, 529 aa, synthetic construct
  REGION 1..529: note = Variant of terminal deoxynucleotidyl transferase
MHHHHHHGGSGSHGIRTIDSDFGKKQQKKGDNHDSSATYEIKFHEFVLFILEEKMGATRRTFLTDLARKKGFRVENELTDEVTHIVAENLSRSEVLAWLKEHKMEKTKQFELLDISWLIESMKVGKPVDTKGKYQLAESVEVSANPDPTEGRVNELPPTMKTVSPYACQRRTTLNNRNQRFTDSLEILRENYELKGNDDTALEFRRAISVLKSLPFEVRSLKDTEGLPWISDEVKGIMEEIIEVGESREVQAVLNDEWYQSFHAFTRVFGVGVKTADKWYRMGLRTLEDVRSSKTLKLTPWQKVGLLYYEDLARGVTRAEADAIWLLVQDAVATFDPDAIVEIVGGQRRGKPQGHDVDLLISSPGAEKEQEDQLLQKVMNLWKKQGLLLCGRLEWSQWEWGGLPSGKADEGDAEASCFLILKLYDHLVRKSKRNMPTGSNMGESKPWKAIKVDLLRCPRGSFAFAMLQWTGSRMFRRDLRDYAREEKNMMLDNHSLYDMTRGIQLPAKSEEEIFEHLGLEYLEPFERNA

SEQ ID NO: 371 - DNA, 633 bp, synthetic construct
  misc_feature 1..633: note = Variant of 3'O-kinase
  source 1..633: mol_type = other DNA
atggcgtttaccattggtttaacaggagggatcgcagagggcaaatcgactgtgagtgccatgatgcgtgaactgggtctgccggtcatcgatgctgacgaggcagcacgcgccgttgttcgtccaggcgaagaagcttatcgccagattgtagctgcgttcggtccgggcattcttcgtgccgatggcgagatcgatcgcgccaaattgggtgctatcgtgttttcggacgaacaacaacgtaaggtgctgaatgcgattgtaggtcctgcagtccagaagaagatgctcgctgagaaagaagctcatatccgctcaggcgccaagacggttgtgctggatatcccgctgctgttcgaatccggattgacccattgggtcgacaaagtgctcgtggtgtacgtcgatgatgatgttcagttacgccgccttatggcacgtaacgggtttactgaagaagaagctctggcccgcattcgttcacagtggcccagtgcggagaaagttaaacgtgcagacgctgtaatcgacaataatggcacgattgaagaaacccgccgccagctgctggccattttacaccagtgggatctgctgggtaagggtggctccggccaccatcatcaccatcac

SEQ ID NO: 372 - protein, 211 aa, synthetic construct
  REGION 1..211: note = Variant of 3'O-kinase
MAFTIGLTGGIAEGKSTVSAMMRELGLPVIDADEAARAVVRPGEEAYRQIVAAFGPGILRADGEIDRAKLGAIVFSDEQQRKVLNAIVGPAVQKKMLAEKEAHIRSGAKTVVLDIPLLFESGLTHWVDKVLVVYVDDDVQLRRLMARNGFTEEEALARIRSQWPSAEKVKRADAVIDNNGTIEETRRQLLAILHQWDLLGKGGSGHHHHHH

SEQ ID NO: 373 - DNA, 633 bp, synthetic construct
  misc_feature 1..633: note = Variant of 3'O-kinase
  source 1..633: mol_type = other DNA
atggcgtttaccattggtttaacaggagggatcgcatcgggcaaatcgactgtgagtgccatgatgcgtgaactgggtctgccggtcatcgatgctgacgaggcagcacgcgccgttgttcgtccaggcgaagaagcttatcgccagattgtagctgcgttcggtccgggcattcttcgtgccgatggcgagatcgatcgcgccaaattgggtgctatcgtgtttgctgacgaacaacaacgtaaggtgctgaatgcgattgtaggtcctgcagtctataagaagatgctcgctgagaaagaagctcatatccgctcaggcgccaagacggttgtgctggatatcccgctgctgttcgaatccggattgacccattgggtcgacaaagtgctcgtggtgtacgtcgatgatgatgttcagttacgccgccttatggcacgtaacgggtttaccgaagaagaagctctggcccgcattcgttcacagtggcccagtgccgagaaagttaaacgtgcagacgctgtaatcgacaataatggcaatatcgaagaaacccgccgccagctgctggccattttacaccagtgggatgcactgggtaagggtggctccggccaccatcatcaccatcac

SEQ ID NO: 374 - protein, 211 aa, synthetic construct
  REGION 1..211: note = Variant of 3'O-kinase
MAFTIGLTGGIASGKSTVSAMMRELGLPVIDADEAARAVVRPGEEAYRQIVAAFGPGILRADGEIDRAKLGAIVFADEQQRKVLNAIVGPAVYKKMLAEKEAHIRSGAKTVVLDIPLLFESGLTHWVDKVLVVYVDDDVQLRRLMARNGFTEEEALARIRSQWPSAEKVKRADAVIDNNGNIEETRRQLLAILHQWDALGKGGSGHHHHHH

SEQ ID NO: 375 - DNA, 633 bp, synthetic construct
  misc_feature 1..633: note = Variant of 3'O-kinase
  source 1..633: mol_type = other DNA
atggcgtttaccattggtttaacaggagggatcgcatcgggcaaatcgactgtgagtgccatgatgcgtgaactgggtctgccggtcatcgatgctgacgaggcagcacgcgccgttgttcgtccaggcgaagaagcttatcgccagattgtagctgcgttcggtccgggcattcttcgtgccgatggcgagatcgatcgcgggaaattgggtgctatcgtgtttgctgacgaacaacaacgtaaggtgctgaatgcgattgtaggtcctgcagtctataagaagatgctcgctgagaaagaagctgttatccgctcaggcgccaagacggttgtgctggatatcccgctgctgttcgaatccggattgacccattgggtcgacaaagtgctcgtggtgtacgtcgatgatgatgttcagttacgccgccttatggcacgtaacgggtttaccgaagaagaagctctggcccgcattcgttcacagtggcccagtgccgagaaagttaaacgtgcagacgctgtaatcgacaataatggcaatgaggaagaaacccgccgccagctgctggccattttacaccagtgggatgcactgggtaagggtggctccggccaccatcatcaccatcac

SEQ ID NO: 376 - protein, 211 aa, synthetic construct
  REGION 1..211: note = Variant of 3'O-kinase
MAFTIGLTGGIASGKSTVSAMMRELGLPVIDADEAARAVVRPGEEAYRQIVAAFGPGILRADGEIDRGKLGAIVFADEQQRKVLNAIVGPAVYKKMLAEKEAVIRSGAKTVVLDIPLLFESGLTHWVDKVLVVYVDDDVQLRRLMARNGFTEEEALARIRSQWPSAEKVKRADAVIDNNGNEEETRRQLLAILHQWDALGKGGSGHHHHHH

SEQ ID NO: 377 - DNA, 633 bp, synthetic construct
  misc_feature 1..633: note = Variant of 3'O-kinase
  source 1..633: mol_type = other DNA
atggcgtttaccattggtttaacaggagggatcgcatcgggcaaatcgactgtgagtgccatgatgcgtgaactgggtctgccggtcatcgatgctgacgaggcagcacgcgccgttgttcgtccaggcgaagaagcttatcgccagattgtagctgcgttcggtccgggcattcttcgtgccgatggcgagatcgatcgcgccaaattgggtgctatcgtgtttgctgacgaacaacaacgtaaggtgctgaatgcgattgtaggtcctgcagtctataagaagatgctcgctgagaaagaagctcatatccgctcaggcgccaagacggttgtgctggatatcccgctgctgttcgaatccggattgacccattgggtcgacaaagtgctcgtggtgtacgtcgatgatgatgttcagttacgccgccttatggcacgtaacgggtttaccgaagaagaagctctggcccgcattcgttcacagtggcccagtgccgagaaagttaaacgtgcagacgctgtaatcgacaataatggcactgaggaagaaacccgccgccagctgctggccattttacaccagtgggatgcactgggtaagggtggctccggccaccatcatcaccatcac

SEQ ID NO: 378 - protein, 211 aa, synthetic construct
  REGION 1..211: note = Variant of 3'O-kinase
MAFTIGLTGGIASGKSTVSAMMRELGLPVIDADEAARAVVRPGEEAYRQIVAAFGPGILRADGEIDRAKLGAIVFADEQQRKVLNAIVGPAVYKKMLAEKEAHIRSGAKTVVLDIPLLFESGLTHWVDKVLVVYVDDDVQLRRLMARNGFTEEEALARIRSQWPSAEKVKRADAVIDNNGTEEETRRQLLAILHQWDALGKGGSGHHHHHH

SEQ ID NO: 379 - DNA, 633 bp, synthetic construct
  misc_feature 1..633: note = Variant of 3'O-kinase
  source 1..633: mol_type = other DNA
atggcgtttaccattggtttaacaggagggatcgcaagtggcaaatcgactgtgagtgccatgatgcgtgaactgggtctgccggtcatcgatgctgacgaggcagcacgcgccgttgttcgtccaggcgaagaagcttatcgccagattgtagctgcgttcggtccgggcattcttcgtgccgatggcgagatcgatcgcgccaaattgggtgctatcgtgtttgctgacgaacaacaacgtaaggtgctgaatgcgattgtaggtcctgcagtcctgaagaagatgctcgctgagaaagaagctcatatccgctcaggcgccaagacggttgtgctggatatcccgctgctgttcgaatccggattgacccattgggtcgacaaagtgctcgtggtgtacgtcgatgatgatgttcagttacgccgccttatggcacgtaacgggtttaccgaagaagaagctctggcccgcattcgttcacagtggcccagtgccgagaaagttaaacgtgcagacgctgtaatcgacaataatggcacgattgaagaaacccgccgccagctgctggccattttacaccagtgggatctgctgggtaagggtggctccggccaccatcatcaccatcac

SEQ ID NO: 380 - protein, 211 aa, synthetic construct
  REGION 1..211: note = Variant of 3'O-kinase
MAFTIGLTGGIASGKSTVSAMMRELGLPVIDADEAARAVVRPGEEAYRQIVAAFGPGILRADGEIDRAKLGAIVFADEQQRKVLNAIVGPAVLKKMLAEKEAHIRSGAKTVVLDIPLLFESGLTHWVDKVLVVYVDDDVQLRRLMARNGFTEEEALARIRSQWPSAEKVKRADAVIDNNGTIEETRRQLLAILHQWDLLGKGGSGHHHHHH

SEQ ID NO: 381 - DNA, 633 bp, synthetic construct
  misc_feature 1..633: note = Variant of 3'O-kinase
  source 1..633: mol_type = other DNA
atggcgtttaccattggtttaacaggagggatcgcagagggcaaatcgactgtgagtgccatgatgcgtgaactgggtctgccggtcatcgatgctgacgaggcagcacgcgccgttgttcgtccaggcgaagaagcttatcgccagattgtagctgcgttcggtccgggcattcttcgtgccgatggcgagatcgatcgcgccaaattgggtgctatcgtgttttcggacgaacaacaacgtaaggtgctgaatgcgattgtaggtcctgcagtccagaagaagatgctcgctgagaaagaagctcatatccgctcaggcgccaagacggttgtgctggatatcccgctgctgttcgaatccggattgacccattgggtcgacaaagtgctcgtggtgtacgtcgatgatgatgttcagttacgccgccttatggcacgtaacgggtttaccgaagaagaagctctggcccgcattcgttcacagtggcccagtgccgagaaagttaaacgtgcagacgctgtaatcgacaataatggcacgattgaagaaacccgccgccagctgctggccattttacaccagtgggatgcactgggtaagggtggctccggccaccatcatcaccatcac

SEQ ID NO: 382 - protein, 211 aa, synthetic construct
  REGION 1..211: note = Variant of 3'O-kinase
MAFTIGLTGGIAEGKSTVSAMMRELGLPVIDADEAARAVVRPGEEAYRQIVAAFGPGILRADGEIDRAKLGAIVFSDEQQRKVLNAIVGPAVQKKMLAEKEAHIRSGAKTVVLDIPLLFESGLTHWVDKVLVVYVDDDVQLRRLMARNGFTEEEALARIRSQWPSAEKVKRADAVIDNNGTIEETRRQLLAILHQWDALGKGGSGHHHHHH

SEQ ID NO: 383 - DNA, 633 bp, synthetic construct
  misc_feature 1..633: note = Variant of 3'O-kinase
  source 1..633: mol_type = other DNA
atggcgtttaccattggtttaacaggagggatcgcaagtggcaaatcgactgtgagtgccatgatgcgtgaactgggtctgccggtcatcgatgctgacgaggcagcacgcgccgttgttcgtccaggcgaagaagcttatcgccagattgtagctgcgttcggtccgggcattcttcgtgccgatggcgagatcgatcgcgccaaattgggtgctatcgtgtttgctgacgaacaacaacgtacggtgctgaatgcgattgtaggtcctgcagtctataagaagatgctcgctgagaaagaagctcatatccgctcaggcgccaagacggttgtgctggatatcccgctgctgttcgaatccggattgacccattgggtcgacaaagtgctcgtggtgtacgtcgatgatgatgttcagttacgccgccttatggcacgtaacgggtttaccgaagaagaagctctggcccgcattcgttcacagtggcccagtgccgagaaagttaaacgtgcagacgctgtaatcgacaataatggcacgattgaagaaacccgccgccagctgctggccattttacaccagtgggatattctgggtaagggtggctccggccaccatcatcaccatcac

SEQ ID NO: 384 - protein, 211 aa, synthetic construct
  REGION 1..211: note = Variant of 3'O-kinase
MAFTIGLTGGIASGKSTVSAMMRELGLPVIDADEAARAVVRPGEEAYRQIVAAFGPGILRADGEIDRAKLGAIVFADEQQRTVLNAIVGPAVYKKMLAEKEAHIRSGAKTVVLDIPLLFESGLTHWVDKVLVVYVDDDVQLRRLMARNGFTEEEALARIRSQWPSAEKVKRADAVIDNNGTIEETRRQLLAILHQWDILGKGGSGHHHHHH

SEQ ID NO: 385 - DNA, 633 bp, synthetic construct
  misc_feature 1..633: note = Variant of 3'O-kinase
  source 1..633: mol_type = other DNA
atggcgtttaccattggtttaacaggagggatcgcagagggcaaatcgactgtgagtgccatgatgcgtgaactgggtctgccggtcatcgatgctgacgaggcagcacgcgccgttgttcgtccaggcgaagaagcttatcgccagattgtagctgcgttcggtccgggcattcttcgtgccgatggcgagatcgatcgcgccaaattgggtgctatcgtgttttcggacgaacaacaacgtaaggtgctgaatgcgattgtaggtcctgcagtctacaagaagatgctcgctgagaaagaagctcatatccgctcaggagccaagacggttgtgctggatatcccgctgctgttcgaatccggattgacccattgggtcgacaaagtgctcgtggtgtacgtcgatgatgatgttcagttacgccgccttatggcacgtaacgggtttactgaagaagaagctctggcccgcattcgttcacagtggcccagtgcggagaaagttaaacgtgcagacgctgtaatcgacaataatggcacgattgaagaaacccgccgccagctgctggccattttacaccagtgggatctgctgggtaagggtggctccggccaccatcatcaccatcac

SEQ ID NO: 386 - protein, 211 aa, synthetic construct
  REGION 1..211: note = Variant of 3'O-kinase
MAFTIGLTGGIAEGKSTVSAMMRELGLPVIDADEAARAVVRPGEEAYRQIVAAFGPGILRADGEIDRAKLGAIVFSDEQQRKVLNAIVGPAVYKKMLAEKEAHIRSGAKTVVLDIPLLFESGLTHWVDKVLVVYVDDDVQLRRLMARNGFTEEEALARIRSQWPSAEKVKRADAVIDNNGTIEETRRQLLAILHQWDLLGKGGSGHHHHHH

SEQ ID NO: 387 - DNA, 633 bp, synthetic construct
  misc_feature 1..633: note = Variant of 3'O-kinase
  source 1..633: mol_type = other DNA
atggcgtttaccattggtttaacaggagggatcgcatcgggcaaatcgactgtgagtgccatgatgcgtgaactgggtctgccggtcatcgatgctgacgaggcagcacgcgccgttgttcgtccaggcgaagaagcttatcgccagattgtagctgcgttcggtccgggcattcttcgtgccgatggcgagatcgatcgcgccaaattgggtgctatcgtgtttgctgacgaacaacaacgtaaggtgctgaatgcgattgtaggtcctgcagtctataagaagatgctcgctgagaaagaagctcatatccgctcaggcgccaagacggttgtgctggatatcccgctgctgttcgaatccggattgacccattgggtcgacaaagtgctcgtggtgtacgtcgatgatgatgttcagttacgccgccttatggcacgtaacgggtttaccgaagaagaagctctggcccgcattcgttcacagtggcccagtgccgagaaagttaaacgtgcagacgctgtaatcgacaataatggcacgattgaagaaacccgccgccagctgctggccattttacaccagtgggatgcactgtgtaagggtggctccggccaccatcatcaccatcac

SEQ ID NO: 388 - protein, 211 aa, synthetic construct
  REGION 1..211: note = Variant of 3'O-kinase
MAFTIGLTGGIASGKSTVSAMMRELGLPVIDADEAARAVVRPGEEAYRQIVAAFGPGILRADGEIDRAKLGAIVFADEQQRKVLNAIVGPAVYKKMLAEKEAHIRSGAKTVVLDIPLLFESGLTHWVDKVLVVYVDDDVQLRRLMARNGFTEEEALARIRSQWPSAEKVKRADAVIDNNGTIEETRRQLLAILHQWDALCKGGSGHHHHHH

SEQ ID NO: 389 - DNA, 633 bp, synthetic construct
  misc_feature 1..633: note = Variant of 3'O-kinase
  source 1..633: mol_type = other DNA
atggcgtttaccattggtttaacaggagggatcgcatcgggcaaatcgactgtgagtgccatgatgcgtgaactgggtctgccggtcatcgatgctgacgaggcagcacgcgccgttgttcgtccaggcgaagaagcttatcgccagattgtagctgcgttcggtccgggcattcttcgtgccgatggcgagatcgatcgcgccaaattgggtgctatcgtgtttgctgacgaacaacaacgtaaggtgctgaatgcgattgtaggtcctgcagtccttaagaagatgctcgctgagaaagaagctcatatccgctcaggcgccaagacggttgtgctggatatcccgctgctgttcgaatccggattgacccattgggtcgacaaagtgctcgtggtgtacgtcgatgatgatgttcagttacgccgccttatggcacgtaacgggtttaccgaagaagaagctctggcccgcattcgttcacagtggcccagtgccgagaaagttaaacgtgcagacgctgtaatcgacaataatggcacgattgaagaaacccgccgccagctgctggccattttacaccagtgggatgcactgggtaagggtggctccggccaccatcatcaccatcac

SEQ ID NO: 390 - protein, 211 aa, synthetic construct
  REGION 1..211: note = Variant of 3'O-kinase
MAFTIGLTGGIASGKSTVSAMMRELGLPVIDADEAARAVVRPGEEAYRQIVAAFGPGILRADGEIDRAKLGAIVFADEQQRKVLNAIVGPAVLKKMLAEKEAHIRSGAKTVVLDIPLLFESGLTHWVDKVLVVYVDDDVQLRRLMARNGFTEEEALARIRSQWPSAEKVKRADAVIDNNGTIEETRRQLLAILHQWDALGKGGSGHHHHHH

SEQ ID NO: 391 - DNA, 633 bp, synthetic construct
  misc_feature 1..633: note = Variant of 3'O-kinase
  source 1..633: mol_type = other DNA
atggcgtttaccattggtttaacaggagggatcgcatcgggcaaatcgactgtgagtgccatgatgcgtgaactgggtctgccggtcatcgatgctgacgaggcagcacgcgccgttgttcgtccaggcgaagaagcttatcgccagattgtagctgcgttcggtccgggcattcttcgtgccgatggcgagatcgatcgcgccaaattgggtgctatcgtgtttgctgacgaacaacaacgtaaggtgctgaatgcgattgtaggtcctgcagtctataagaagatgctcgctgagaaagaagctctgatccgctcaggcgccaagacggttgtgctggatatcccgctgctgttcgaatccggattgacccattgggtcgacaaagtgctcgtggtgtacgtcgatgatgatgttcagttacgccgccttatggcacgtaacgggtttaccgaagaagaagctctggcccgcattcgttcacagtggcccagtgccgagaaagttaaacgtgcagacgctgtaatcgacaataatggcacgattgaagaaacccgccgccagctgctggccattttacaccagtgggatgcactgggtaagggtggctccggccaccatcatcaccatcac

SEQ ID NO: 392 - protein, 211 aa, synthetic construct
  REGION 1..211: note = Variant of 3'O-kinase
MAFTIGLTGGIASGKSTVSAMMRELGLPVIDADEAARAVVRPGEEAYRQIVAAFGPGILRADGEIDRAKLGAIVFADEQQRKVLNAIVGPAVYKKMLAEKEALIRSGAKTVVLDIPLLFESGLTHWVDKVLVVYVDDDVQLRRLMARNGFTEEEALARIRSQWPSAEKVKRADAVIDNNGTIEETRRQLLAILHQWDALGKGGSGHHHHHH

SEQ ID NO: 393 - DNA, 633 bp, synthetic construct
  misc_feature 1..633: note = Variant of 3'O-kinase
  source 1..633: mol_type = other DNA
atggcgtttaccattggtttaacaggagggatcgcatcgggcaaatcgactgtgagtgccatgatgcgtgaactgggtctgccggtcatcgatgctgacgaggcagcacgcgccgttgttcgtccaggcgaagaagcttatcgccagattgtagctgcgttcggtccgggcattcttcgtgccgatggcgagatcgatcgcgccaaattgggtgctatcgtgtttgctgacgaacaacaacgtaaggtgctgaatgcgattgtaggtcctgcagtcatgaagaagatgctcgctgagaaagaagctcatatccgctcaggcgccaagacggttgtgctggatatcccgctgctgttcgaatccggattgacccattgggtcgacaaagtgctcgtggtgtacgtcgatgatgatgttcagttacgccgccttatggcacgtaacgggtttaccgaagaagaagctctggcccgcattcgttcacagtggcccagtgccgagaaagttaaacgtgcagacgctgtaatcgacaataatggcacgattgaagaaacccgccgccagctgctggccattttacaccagtgggatgcactgggtaagggtggctccggccaccatcatcaccatcac

SEQ ID NO: 394 - protein, 211 aa, synthetic construct
  REGION 1..211: note = Variant of 3'O-kinase
MAFTIGLTGGIASGKSTVSAMMRELGLPVIDADEAARAVVRPGEEAYRQIVAAFGPGILRADGEIDRAKLGAIVFADEQQRKVLNAIVGPAVMKKMLAEKEAHIRSGAKTVVLDIPLLFESGLTHWVDKVLVVYVDDDVQLRRLMARNGFTEEEALARIRSQWPSAEKVKRADAVIDNNGTIEETRRQLLAILHQWDALGKGGSGHHHHHH

SEQ ID NO: 395 - DNA, 633 bp, synthetic construct
  misc_feature 1..633: note = Variant of 3'O-kinase
  source 1..633: mol_type = other DNA
atggcgtttaccattggtttaacaggagggatcgcatcgggcaaatcgactgtgagtgccatgatgcgtgaactgggtctgccggtcatcgatgctgacgaggcagcacgcgccgttgttcgtccaggcgaagaagcttatcgccagattgtagctgcgttcggtccgggcattcttcgtgccgatggcgagatcgatcgcgccaaattgggtgctatcgtgtttgctgacgaacaacaacgtaaggtgctgaatgcgattgtaggtcctgcagtcgagaagaagatgctcgctgagaaagaagctcatatccgctcaggcgccaagacggttgtgctggatatcccgctgctgttcgaatccggattgacccattgggtcgacaaagtgctcgtggtgtacgtcgatgatgatgttcagttacgccgccttatggcacgtaacgggtttaccgaagaagaagctctggcccgcattcgttcacagtggcccagtgccgagaaagttaaacgtgcagacgctgtaatcgacaataatggcacgattgaagaaacccgccgccagctgctggccattttacaccagtgggatgcactgggtaagggtggctccggccaccatcatcaccatcac

SEQ ID NO: 396 - protein, 211 aa, synthetic construct
  REGION 1..211: note = Variant of 3'O-kinase
MAFTIGLTGGIASGKSTVSAMMRELGLPVIDADEAARAVVRPGEEAYRQIVAAFGPGILRADGEIDRAKLGAIVFADEQQRKVLNAIVGPAVEKKMLAEKEAHIRSGAKTVVLDIPLLFESGLTHWVDKVLVVYVDDDVQLRRLMARNGFTEEEALARIRSQWPSAEKVKRADAVIDNNGTIEETRRQLLAILHQWDALGKGGSGHHHHHH

SEQ ID NO: 397 - DNA, 633 bp, synthetic construct
  misc_feature 1..633: note = Variant of 3'O-kinase
  source 1..633: mol_type = other DNA
atggcgtttaccattggtttaacaggagggatcgcatcgggcaaatcgactgtgagtgccatgatgcgtgaactgggtctgccggtcatcgatgctgacgaggcagcacgcgccgttgttcgtccaggcgaagaagcttatcgccagattgtagctgcgttcggtccgggcattcttcgtgccgatggcgagatcgatcgcgccaaattgggtgctatcgtgtttgctgacgaacaacaacgtaaggtgctgaatgcgattgtaggtcctgcagtccagaagaagatgctcgctgagaaagaagctcatatccgctcaggcgccaagacggttgtgctggatatcccgctgctgttcgaatccggattgacccattgggtcgacaaagtgctcgtggtgtacgtcgatgatgatgttcagttacgccgccttatggcacgtaacgggtttaccgaagaagaagctctggcccgcattcgttcacagtggcccagtgccgagaaagttaaacgtgcagacgctgtaatcgacaataatggcacgattgaagaaacccgccgccagctgctggccattttacaccagtgggatgcactgggtaagggtggctccggccaccatcatcaccatcac

SEQ ID NO: 398 - protein, 211 aa, synthetic construct
  REGION 1..211: note = Variant of 3'O-kinase
MAFTIGLTGGIASGKSTVSAMMRELGLPVIDADEAARAVVRPGEEAYRQIVAAFGPGILRADGEIDRAKLGAIVFADEQQRKVLNAIVGPAVQKKMLAEKEAHIRSGAKTVVLDIPLLFESGLTHWVDKVLVVYVDDDVQLRRLMARNGFTEEEALARIRSQWPSAEKVKRADAVIDNNGTIEETRRQLLAILHQWDALGKGGSGHHHHHH

SEQ ID NO: 399 - DNA, 633 bp, synthetic construct
  misc_feature 1..633: note = Variant of 3'O-kinase
  source 1..633: mol_type = other DNA
atggcgtttaccattggtttaacaggagggatcgcatcgggcaaatcgactgtgagtgccatgatgcgtgaactgggtctgccggtcatcgatgctgacgaggcagcacgcgccgttgttcgtccaggcgaagaagcttatcgccagattgtagctgcgttcggtccgggcattcttcgtgccgatggcgagatcgatcgcgccaaattgggtgctatcgtgtttgctgacgaacaacaacgtaaggtgctgaatgcgattgtaggtcctgcagtctataagaagatgctcgctgagaaagaagctcatatccgctcaggcgccaagacgattgtgctggatatcccgctgctgttcgaatccggattgacccattgggtcgacaaagtgctcgtggtgtacgtcgatgatgatgttcagttacgccgccttatggcacgtaacgggtttaccgaagaagaagctctggcccgcattcgttcacagtggcccagtgccgagaaagttaaacgtgcagacgctgtaatcgacaataatggcacgattgaagaaacccgccgccagctgctggccattttacaccagtgggatgcactgggtaagggtggctccggccaccatcatcaccatcac

SEQ ID NO: 400 - protein, 211 aa, synthetic construct
  REGION 1..211: note = Variant of 3'O-kinase
MAFTIGLTGGIASGKSTVSAMMRELGLPVIDADEAARAVVRPGEEAYRQIVAAFGPGILRADGEIDRAKLGAIVFADEQQRKVLNAIVGPAVYKKMLAEKEAHIRSGAKTIVLDIPLLFESGLTHWVDKVLVVYVDDDVQLRRLMARNGFTEEEALARIRSQWPSAEKVKRADAVIDNNGTIEETRRQLLAILHQWDALGKGGSGHHHHHH

SEQ ID NO: 401 - DNA, 633 bp, synthetic construct
  misc_feature 1..633: note = Variant of 3'O-kinase
  source 1..633: mol_type = other DNA
atggcgtttaccattggtttaacaggagggatcgcatcgggcaaatcgactgtgagtgccatgatgcgtgaactgggtctgccggtcatcgatgctgacgaggcagcacgcgccgttgttcgtccaggcgaagaagcttatcgccagattgtagctgcgttcggtccgggcattcttcgtgccgatggcgagatcgatcgcgccaaattgggtgctatcgtgtttgctgacgaacaacaacgtaaggtgctgaatgcgattgtaggtcctgcagtctataagaagatgctcgctgagaaagaagctcatatccgctcaggcgccaagacggttgtgctggatatcccgctgctgttcgaatccggattgacccattgggtcgacaaagtgctcgtggtgtacgtcgatgatgatgttcagttacgccgccttatggcacgtaacgggtttaccgaagaagaagctctggcccgcattcgttcacagtggcccagtgccgagaaagttaaacgtgcagacgctgtaatcgacaataatggcacgattgaagaaacccgccgccagctgctggccattttacaccagtgggatgcactgggtaagggtggctccggccaccatcatcacagtcac

SEQ ID NO: 402 - protein, 211 aa, synthetic construct
  REGION 1..211: note = Variant of 3'O-kinase
MAFTIGLTGGIASGKSTVSAMMRELGLPVIDADEAARAVVRPGEEAYRQIVAAFGPGILRADGEIDRAKLGAIVFADEQQRKVLNAIVGPAVYKKMLAEKEAHIRSGAKTVVLDIPLLFESGLTHWVDKVLVVYVDDDVQLRRLMARNGFTEEEALARIRSQWPSAEKVKRADAVIDNNGTIEETRRQLLAILHQWDALGKGGSGHHHHSH

SEQ ID NO: 403 - DNA, 633 bp, synthetic construct
  misc_feature 1..633: note = Variant of 3'O-kinase
  source 1..633: mol_type = other DNA
atggcgtttaccattggtttaacaggagggatcgcatcgggcaaatcgactgtgagtgccatgatgcgtgaactgggtctgccggtcatcgatgctgacgaggcagcacgcgccgttgttcgtccaggcgaagaagcttatcgccagattgtagctgcgttcggtccgggcattcttcgtgccgatggcgagatcgatcgcgccaaattgggtgctatcgtgtttgctgacgaacaacaacgtaaggtgctgaatgcgattgtaggtcctgcagtctataagaagatgctcgctgagaaagaagctcatatccgctcaggcgccaagacggttgtgctggatatcccgctgctgttcgaatccggattgacccattgggtcgacaaagtgctcgtggtgtacgtcgatgatgatgttcagttacgccgccttatggcacgtaacgggtttaccgaagaagaagctctggcccgcattcgttcacagtggcccagtgccgagaaagttaaacgtgcagacgctgtaatcgacaataatggcacgattgaagaaacccgccgccagctgctggatattttacaccagtgggatgcactgggtaagggtggctccggccaccatcatcaccatcac

SEQ ID NO: 404 - protein, 211 aa, synthetic construct
  REGION 1..211: note = Variant of 3'O-kinase
MAFTIGLTGGIASGKSTVSAMMRELGLPVIDADEAARAVVRPGEEAYRQIVAAFGPGILRADGEIDRAKLGAIVFADEQQRKVLNAIVGPAVYKKMLAEKEAHIRSGAKTVVLDIPLLFESGLTHWVDKVLVVYVDDDVQLRRLMARNGFTEEEALARIRSQWPSAEKVKRADAVIDNNGTIEETRRQLLDILHQWDALGKGGSGHHHHHH

SEQ ID NO: 405 - DNA, 633 bp, synthetic construct
  misc_feature 1..633: note = Variant of 3'O-kinase
  source 1..633: mol_type = other DNA
atggcgtttaccattggtttaacaggagggatcgcatcgggcaaatcgactgtgagtgccatgatgcgtgaactgggtctgccggtcatcgatgctgacgaggcagcacgcgccgttgttcgtccaggcgaagaagcttatcgccagattgtagctgcgttcggtccgggcattcttcgtgccgatggcgagatcgatcgcgccaaattgggtgctatcgtgtttgctgacgaacaacaacgtaaggtgctgaatgcgattgtaggtcctgcagtctataagaagatgctcgctgagaaagaagctcatatccgctcaggcgccaagacggttgtgctggatatcccgctgctgttcgaatccggattgacccattgggtcgacaaagtgctcgtggtgtacgtcgatgatgatgttcagttacgccgccttatggcacgtaacgggtttaccgaagaagaagctctggcccgcattcgttcacagtggcccagtgccgagaaagttaaacgtgcagacgctgtaatcgacaataatggcacgattgaagaaacccgccgccagctgctggccattttacaccagtgggatgcactgggtaagggtggctccggccaccatcatcacgagcac

SEQ ID NO: 406 - protein, 211 aa, synthetic construct
  REGION 1..211: note = Variant of 3'O-kinase
MAFTIGLTGGIASGKSTVSAMMRELGLPVIDADEAARAVVRPGEEAYRQIVAAFGPGILRADGEIDRAKLGAIVFADEQQRKVLNAIVGPAVYKKMLAEKEAHIRSGAKTVVLDIPLLFESGLTHWVDKVLVVYVDDDVQLRRLMARNGFTEEEALARIRSQWPSAEKVKRADAVIDNNGTIEETRRQLLAILHQWDALGKGGSGHHHHEH

SEQ ID NO: 407 - DNA, 633 bp, synthetic construct
  misc_feature 1..633: note = Variant of 3'O-kinase
  source 1..633: mol_type = other DNA
atggcgtttaccattggtttaacaggagggatcgcatcgggcaaatcgactgtgagtgccatgatgcgtgaactgggtctgccggtcatcgatgctgacgaggcagcacgcgccgttgttcgtccaggcgaagaagcttatcgccagattgtagctgcgttcggtccgggcattcttcgtgccgatggcgagatcgatcgcgccaaattgggtgctatcgtgtttgctgacgaacaacaacgtgaggtgctgaatgcgattgtaggtcctgcagtctataagaagatgctcgctgagaaagaagctcatatccgctcaggcgccaagacggttgtgctggatatcccgctgctgttcgaatccggattgacccattgggtcgacaaagtgctcgtggtgtacgtcgatgatgatgttcagttacgccgccttatggcacgtaacgggtttaccgaagaagaagctctggcccgcattcgttcacagtggcccagtgccgagaaagttaaacgtgcagacgctgtaatcgacaataatggcacgattgaagaaacccgccgccagctgctggccattttacaccagtgggatgcactgggtaagggtggctccggccaccatcatcaccatcac

SEQ ID NO: 408 - protein, 211 aa, synthetic construct
  REGION 1..211: note = Variant of 3'O-kinase
MAFTIGLTGGIASGKSTVSAMMRELGLPVIDADEAARAVVRPGEEAYRQIVAAFGPGILRADGEIDRAKLGAIVFADEQQREVLNAIVGPAVYKKMLAEKEAHIRSGAKTVVLDIPLLFESGLTHWVDKVLVVYVDDDVQLRRLMARNGFTEEEALARIRSQWPSAEKVKRADAVIDNNGTIEETRRQLLAILHQWDALGKGGSGHHHHHH

SEQ ID NO: 409 - DNA, 633 bp, synthetic construct
  misc_feature 1..633: note = Variant of 3'O-kinase
  source 1..633: mol_type = other DNA
atggcgtttaccattggtttaacaggagggatcgcatcgggcaaatcgactgtgagtgccatgatgcgtgaactgggtctgccggtcatcgatgctgacgaggcagcacgcgccgttgttcgtccaggcgaagaagcttatcgccagattgtagctgcgttcggtccgggcattcttcgtgccgatggcgagatcgatcgcgccaaattgggtgctatcgtgtttgctgacgaacaacaacgtaaggtgctgaatgcgattgtaggtcctgcagtctgtaagaagatgctcgctgagaaagaagctcatatccgctcaggcgccaagacggttgtgctggatatcccgctgctgttcgaatccggattgacccattgggtcgacaaagtgctcgtggtgtacgtcgatgatgatgttcagttacgccgccttatggcacgtaacgggtttaccgaagaagaagctctggcccgcattcgttcacagtggcccagtgccgagaaagttaaacgtgcagacgctgtaatcgacaataatggcacgattgaagaaacccgccgccagctgctggccattttacaccagtgggatgcactgggtaagggtggctccggccaccatcatcaccatcac

SEQ ID NO: 410 - protein, 211 aa, synthetic construct
  REGION 1..211: note = Variant of 3'O-kinase
MAFTIGLTGGIASGKSTVSAMMRELGLPVIDADEAARAVVRPGEEAYRQIVAAFGPGILRADGEIDRAKLGAIVFADEQQRKVLNAIVGPAVCKKMLAEKEAHIRSGAKTVVLDIPLLFESGLTHWVDKVLVVYVDDDVQLRRLMARNGFTEEEALARIRSQWPSAEKVKRADAVIDNNGTIEETRRQLLAILHQWDALGKGGSGHHHHHH

SEQ ID NO: 411 - DNA, 633 bp, synthetic construct
  misc_feature 1..633: note = Variant of 3'O-kinase
  source 1..633: mol_type = other DNA
atggcgtttaccattggtttaacaggagggatcgcatcgggcaaatcgactgtgagtgccatgatgcgtgaactgggtctgccggtcatcgatgctgacgaggcagcacgcgccgttgttcgtccaggcgaagaagcttatcgccagattgtagctgcgttcggtccgggcattcttcgtgccgatggcgagatcgatcgcgccaaattgggtgctatcgtgtttgctgacgaacaacaacgtaaggtgctgaatgcgattgtaggtcctgcagtcgtgaagaagatgctcgctgagaaagaagctcatatccgctcaggcgccaagacggttgtgctggatatcccgctgctgttcgaatccggattgacccattgggtcgacaaagtgctcgtggtgtacgtcgatgatgatgttcagttacgccgccttatggcacgtaacgggtttaccgaagaagaagctctggcccgcattcgttcacagtggcccagtgccgagaaagttaaacgtgcagacgctgtaatcgacaataatggcacgattgaagaaacccgccgccagctgctggccattttacaccagtgggatgcactgggtaagggtggctccggccaccatcatcaccatcac

SEQ ID NO: 412 - protein, 211 aa, synthetic construct
  REGION 1..211: note = Variant of 3'O-kinase
MAFTIGLTGGIASGKSTVSAMMRELGLPVIDADEAARAVVRPGEEAYRQIVAAFGPGILRADGEIDRAKLGAIVFADEQQRKVLNAIVGPAVVKKMLAEKEAHIRSGAKTVVLDIPLLFESGLTHWVDKVLVVYVDDDVQLRRLMARNGFTEEEALARIRSQWPSAEKVKRADAVIDNNGTIEETRRQLLAILHQWDALGKGGSGHHHHHH

SEQ ID NO: 413 - DNA, 633 bp, synthetic construct
  misc_feature 1..633: note = Variant of 3'O-kinase
  source 1..633: mol_type = other DNA
atggcgtttaccattggtttaacaggagggatcgcatcgggcaaatcgactgtgagtgccatgatgcgtgaactgggtctgccggtcatcgatgctgacgaggcagcacgcgccgttgttcgtccaggcgaagaagcttatcgccagattgtagctgcgttcggtccgggcattcttcgtgccgatggcgagatcgatcgcgccaaattgggtgctatcgtgttttcggacgaacaacaacgtaaggtgctgaatgcgattgtaggtcctgcagtctataagaagatgctcgctgagaaagaagctcatatccgctcaggcgccaagacggttgtgctggatatcccgctgctgttcgaatccggattgacccattgggtcgacaaagtgctcgtggtgtacgtcgatgatgatgttcagttacgccgccttatggcacgtaacgggtttaccgaagaagaagctctggcccgcattcgttcacagtggcccagtgccgagaaagttaaacgtgcagacgctgtaatcgacaataatggcacgattgaagaaacccgccgccagctgctggccattttacaccagtgggatgcactgggtaagggtggctccggccaccatcatcaccatcac

SEQ ID NO: 414 - protein, 211 aa, synthetic construct
  REGION 1..211: note = Variant of 3'O-kinase
MAFTIGLTGGIASGKSTVSAMMRELGLPVIDADEAARAVVRPGEEAYRQIVAAFGPGILRADGEIDRAKLGAIVFSDEQQRKVLNAIVGPAVYKKMLAEKEAHIRSGAKTVVLDIPLLFESGLTHWVDKVLVVYVDDDVQLRRLMARNGFTEEEALARIRSQWPSAEKVKRADAVIDNNGTIEETRRQLLAILHQWDALGKGGSGHHHHHH

SEQ ID NO: 415 - DNA, 633 bp, synthetic construct
  misc_feature 1..633: note = Variant of 3'O-kinase
  source 1..633: mol_type = other DNA
atggcgtttaccattggtttaacaggagggatcgcatcgggcaaatcgactgtgagtgccatgatgcgtgaactgggtctgccggtcatcgatgctgacgaggcagcacgcgccgttgttcgtccaggcgaagaagcttatcgccagattgtagctgcgttcggtccgggcattcttcgtgccgatggcgagatcgatcgcgccaaattgggtgctatcgtgtttgctgacgaacaacaacgtaaggtgctgaatgcgattgtaggtcctgcagtctataagaagatgctcgctgagaaagaagctcatatccgctcaggcgccaagacggttgtgctggatatcccgctgctgttcgaatccggattgacccattgggtcgacaaagtgctcgtggtgtacgtcgatgatgatgttcagttacgccgccttatggcacgtaacgggtttaccgaagaagaagctctggcccgcattcgttcacagtggcccagtgccgagaaagttaaacgtgcagacgctgtaatcgacaataatggcacgattgaagaaacccgccgccagctgctggccattttacaccagtgggatgcactgggtaagggtggctccggccaccatcatcacccgcac

SEQ ID NO: 416 - protein, 211 aa, synthetic construct
  REGION 1..211: note = Variant of 3'O-kinase
MAFTIGLTGGIASGKSTVSAMMRELGLPVIDADEAARAVVRPGEEAYRQIVAAFGPGILRADGEIDRAKLGAIVFADEQQRKVLNAIVGPAVYKKMLAEKEAHIRSGAKTVVLDIPLLFESGLTHWVDKVLVVYVDDDVQLRRLMARNGFTEEEALARIRSQWPSAEKVKRADAVIDNNGTIEETRRQLLAILHQWDALGKGGSGHHHHPH

SEQ ID NO: 417 - DNA, 633 bp, synthetic construct
  misc_feature 1..633: note = Variant of 3'O-kinase
  source 1..633: mol_type = other DNA
atggcgtttaccattggtttaacaggagggatcgcatcgggcaaatcgactgtgagtgccatgatgcgtgaactgggtctgccggtcatcgatgctgacgaggcagcacgcgccgttgttcgtccaggcgaagaagcttatcgccagattgtagctgcgttcggtccgggcattcttcgtgccgatggcgagatcgatcgcgccaaattgggtgctatcgtgtttgctgacgaacaacaacgtaaggtgctgaatgcgattgtaggtcctgcagtctataagaagatgctcgctgagaaagaagctcatatccgctcaggcgccaagacggttgtgctggatatcccgctgctgttcgaatccggattgacccattgggtcgacaaagtgctcgtggtgtacgtcgatgatgatgttcagttacgccgccttatggcacgtaacgggtttaccgaagaagaagctctggcccgcattcgttcacagtggcccagtgccgagaaagttaaacgtgcagacgctgtaatcgacaataatggcacgattgaagaaacccgccgccagctgctggccattttacaccagtgggatgcactgggtaagggtggctccggccaccatcatcaccataaa

SEQ ID NO: 418 - protein, 211 aa, synthetic construct
  REGION 1..211: note = Variant of 3'O-kinase
MAFTIGLTGGIASGKSTVSAMMRELGLPVIDADEAARAVVRPGEEAYRQIVAAFGPGILRADGEIDRAKLGAIVFADEQQRKVLNAIVGPAVYKKMLAEKEAHIRSGAKTVVLDIPLLFESGLTHWVDKVLVVYVDDDVQLRRLMARNGFTEEEALARIRSQWPSAEKVKRADAVIDNNGTIEETRRQLLAILHQWDALGKGGSGHHHHHK

SEQ ID NO: 419 - DNA, 633 bp, synthetic construct
  misc_feature 1..633: note = Variant of 3'O-kinase
  source 1..633: mol_type = other DNA
atggcgtttaccattggtttaacaggagggatcgcatcgggcaaatcgactgtgagtgccatgatgcgtgaactgggtctgccggtcatcgatgctgacgaggcagcacgcgccgttgttcgtccaggcgaagaagcttatcgccagattgtagctgcgttcggtccgggcattcttcgtgccgatggcgagatcgatcgcgccaaattgggtgctatcgtgtttgctgacgaacaacaacgtaaggtgctgaatgcgattgtaggtcctgcagtctataagaagatgctcgctgagaaagaagctcatatccgctcaggcgccaagacggttgtgctggatatcccgctgctgttcgaatccggattgacccattgggtcgacaaagtgctcgtggtgtacgtcgatgatgatgttcagttacgccgccttatggcacgtaacgggtttaccgaagaagaagctctggcccgcattcgttcacagtggcccagtgccgagaaagttaaacgtgcagacgctgtaatcgacaataatggcacgattgaagaaacccgccgccagctgctggccattttacaccagtgggatgcactggataagggtggctccggccaccatcatcaccatcac

SEQ ID NO: 420 - protein, 211 aa, synthetic construct
  REGION 1..211: note = Variant of 3'O-kinase
MAFTIGLTGGIASGKSTVSAMMRELGLPVIDADEAARAVVRPGEEAYRQIVAAFGPGILRADGEIDRAKLGAIVFADEQQRKVLNAIVGPAVYKKMLAEKEAHIRSGAKTVVLDIPLLFESGLTHWVDKVLVVYVDDDVQLRRLMARNGFTEEEALARIRSQWPSAEKVKRADAVIDNNGTIEETRRQLLAILHQWDALDKGGSGHHHHHH

SEQ ID NO: 421 - DNA, 633 bp, synthetic construct
  misc_feature 1..633: note = Variant of 3'O-kinase
  source 1..633: mol_type = other DNA
atggcgtttaccattggtttaacaggagggatcgcatcgggcaaatcgactgtgagtgccatgatgcgtgaactgggtctgccggtcatcgatgctgacgaggcagcacgcgccgttgttcgtccaggcgaagaagcttatcgccagattgtagctgcgttcggtccgggcattcttcgtgccgatggcgagatcgatcgcgccaaattgggtgctatcgtgtttgctgacgaacaacaacgtaaggtgctgaatgcgattgtaggtcctgcagtctataagaagatgctcgctgagaaagaagctcatatccgctcaggcgccaagacggttgtgctggatatcccgctgctgttcgaatccggattgacccattgggtcgacaaagtgctcgtggtgtacgtcgatgatgatgttcagttacgccgccttatggcacgtaacgggtttaccgaagaagaagctctggcccgcattcgttcacagtggcccagtgccgagaaagttaaacgtgcagacgctgtaatcgacaataatggcacgattgaagaaacccgccgccagctgctggccattttacaccagtgggatgcactgggtaagggtggctccggccaccatcatcaccagcac

SEQ ID NO: 422 - protein, 211 aa, synthetic construct
  REGION 1..211: note = Variant of 3'O-kinase
MAFTIGLTGGIASGKSTVSAMMRELGLPVIDADEAARAVVRPGEEAYRQIVAAFGPGILRADGEIDRAKLGAIVFADEQQRKVLNAIVGPAVYKKMLAEKEAHIRSGAKTVVLDIPLLFESGLTHWVDKVLVVYVDDDVQLRRLMARNGFTEEEALARIRSQWPSAEKVKRADAVIDNNGTIEETRRQLLAILHQWDALGKGGSGHHHHQH

SEQ ID NO: 423 - DNA, 633 bp, synthetic construct
  misc_feature 1..633: note = Variant of 3'O-kinase
  source 1..633: mol_type = other DNA
atggcgtttaccattggtttaacaggagggatcgcatcgggcaaatcgactgtgagtgccatgatgcgtgaactgggtctgccggtcatcgatgctgacgaggcagcacgcgccgttgttcgtccaggcgaagaagcttatcgccagattgtagctgcgttcggtccgggcattcttcgtgccgatggcgagatcgatcgcgccaaattgggtgctatcgtgtttgctgacgaacaacaacgtaaggtgctgaatgcgattgtaggtcctgcagtcattaagaagatgctcgctgagaaagaagctcatatccgctcaggcgccaagacggttgtgctggatatcccgctgctgttcgaatccggattgacccattgggtcgacaaagtgctcgtggtgtacgtcgatgatgatgttcagttacgccgccttatggcacgtaacgggtttaccgaagaagaagctctggcccgcattcgttcacagtggcccagtgccgagaaagttaaacgtgcagacgctgtaatcgacaataatggcacgattgaagaaacccgccgccagctgctggccattttacaccagtgggatgcactgggtaagggtggctccggccaccatcatcaccatcac

SEQ ID NO: 424 - protein, 211 aa, synthetic construct
  REGION 1..211: note = Variant of 3'O-kinase
MAFTIGLTGGIASGKSTVSAMMRELGLPVIDADEAARAVVRPGEEAYRQIVAAFGPGILRADGEIDRAKLGAIVFADEQQRKVLNAIVGPAVIKKMLAEKEAHIRSGAKTVVLDIPLLFESGLTHWVDKVLVVYVDDDVQLRRLMARNGFTEEEALARIRSQWPSAEKVKRADAVIDNNGTIEETRRQLLAILHQWDALGKGGSGHHHHHH

SEQ ID NO: 425 - DNA, 633 bp, synthetic construct
  misc_feature 1..633: note = Variant of 3'O-kinase
  source 1..633: mol_type = other DNA
atggcgtttaccattggtttaacaggagggatcgcatcgggcaaatcgactgtgagtgccatgatgcgtgaactgggtctgccggtcatcgatgctgacgaggcagcacgcgccgttgttcgtccaggcgaagaagcttatcgccagattgtagctgcgttcggtccgggcattcttcgtgccgatggcgagatcgatcgcgccaaattgggtgctatcgtgtttgctgacgaacaacaacgtaaggtgctgaatagtattgtaggtcctgcagtctataagaagatgctcgctgagaaagaagctcatatccgctcaggcgccaagacggttgtgctggatatcccgctgctgttcgaatccggattgacccattgggtcgacaaagtgctcgtggtgtacgtcgatgatgatgttcagttacgccgccttatggcacgtaacgggtttaccgaagaagaagctctggcccgcattcgttcacagtggcccagtgccgagaaagttaaacgtgcagacgctgtaatcgacaataatggcacgattgaagaaacccgccgccagctgctggccattttacaccagtgggatgcactgggtaagggtggctccggccaccatcatcaccatcac

SEQ ID NO: 426 - protein, 211 aa, synthetic construct
  REGION 1..211: note = Variant of 3'O-kinase
MAFTIGLTGGIASGKSTVSAMMRELGLPVIDADEAARAVVRPGEEAYRQIVAAFGPGILRADGEIDRAKLGAIVFADEQQRKVLNSIVGPAVYKKMLAEKEAHIRSGAKTVVLDIPLLFESGLTHWVDKVLVVYVDDDVQLRRLMARNGFTEEEALARIRSQWPSAEKVKRADAVIDNNGTIEETRRQLLAILHQWDALGKGGSGHHHHHH

SEQ ID NO: 427 - DNA, 633 bp, synthetic construct
  misc_feature 1..633: note = Variant of 3'O-kinase
  source 1..633: mol_type = other DNA
atggcgtttaccattggtttaacaggagggatcgcatcgggcaaatcgactgtgagtgccatgatgcgtgaactgggtctgccggtcatcgatgctgacgaggcagcacgcgccgttgttcgtccaggcgaagaagcttatcgccagattgtagctgcgttcggtccgggcattcttcgtgccgatggcgagatcgatcgccagaaattgggtgctatcgtgtttgctgacgaacaacaacgtaaggtgctgaatgcgattgtaggtcctgcagtctataagaagatgctcgctgagaaagaagctcatatccgctcaggcgccaagacggttgtgctggatatcccgctgctgttcgaatccggattgacccattgggtcgacaaagtgctcgtggtgtacgtcgatgatgatgttcagttacgccgccttatggcacgtaacgggtttaccgaagaagaagctctggcccgcattcgttcacagtggcccagtgccgagaaagttaaacgtgcagacgctgtaatcgacaataatggcacgattgaagaaacccgccgccagctgctggccattttacaccagtgggatgcactgggtaagggtggctccggccaccatcatcaccatcac

SEQ ID NO: 428 - protein, 211 aa, synthetic construct
  REGION 1..211: note = Variant of 3'O-kinase
MAFTIGLTGGIASGKSTVSAMMRELGLPVIDADEAARAVVRPGEEAYRQIVAAFGPGILRADGEIDRQKLGAIVFADEQQRKVLNAIVGPAVYKKMLAEKEAHIRSGAKTVVLDIPLLFESGLTHWVDKVLVVYVDDDVQLRRLMARNGFTEEEALARIRSQWPSAEKVKRADAVIDNNGTIEETRRQLLAILHQWDALGKGGSGHHHHHH

SEQ ID NO: 429 - DNA, 633 bp, synthetic construct
  misc_feature 1..633: note = Variant of 3'O-kinase
  source 1..633: mol_type = other DNA
atggcgtttaccattggtttaacaggagggatcgcatcgggcaaatcgactgtgagtgccatgatgcgtgaactgggtctgccggtcatcgatgctgacgaggcagcacgcgccgttgttcgtccaggcgaagaagcttatcgccagattgtagctgcgttcggtccgggcattcttcgtgccgatggcgagatcgatcgcgccaaattgggtgctatcgtgtttgctgacgaacaacaacgtaaggtgctgaatgcgattcttggtcctgcagtctataagaagatgctcgctgagaaagaagctcatatccgctcaggcgccaagacggttgtgctggatatcccgctgctgttcgaatccggattgacccattgggtcgacaaagtgctcgtggtgtacgtcgatgatgatgttcagttacgccgccttatggcacgtaacgggtttaccgaagaagaagctctggcccgcattcgttcacagtggcccagtgccgagaaagttaaacgtgcagacgctgtaatcgacaataatggcacgattgaagaaacccgccgccagctgctggccattttacaccagtgggatgcactgggtaagggtggctccggccaccatcatcaccatcac

SEQ ID NO: 430 - protein, 211 aa, synthetic construct
  REGION 1..211: note = Variant of 3'O-kinase
MAFTIGLTGGIASGKSTVSAMMRELGLPVIDADEAARAVVRPGEEAYRQIVAAFGPGILRADGEIDRAKLGAIVFADEQQRKVLNAILGPAVYKKMLAEKEAHIRSGAKTVVLDIPLLFESGLTHWVDKVLVVYVDDDVQLRRLMARNGFTEEEALARIRSQWPSAEKVKRADAVIDNNGTIEETRRQLLAILHQWDALGKGGSGHHHHHH

SEQ ID NO: 431 - DNA, 633 bp, synthetic construct
  misc_feature 1..633: note = Variant of 3'O-kinase
  source 1..633: mol_type = other DNA
atggcgtttaccattggtttaacaggagggatcgcatcgggcaaatcgactgtgagtgccatgatgcgtgaactgggtctgccggtcatcgatgctgacgaggcagcacgcgccgttgttcgtccaggcgaagaagcttatcgccagattgtagctgcgttcggtccgggcattcttcgtgccgatggcgagatcgatcgcgccaaattgggtgctatcgtgtttgctgacgaacaacaacgtaaggtgctgaatgcgattgtaggtcctgcagtctttaagaagatgctcgctgagaaagaagctcatatccgctcaggcgccaagacggttgtgctggatatcccgctgctgttcgaatccggattgacccattgggtcgacaaagtgctcgtggtgtacgtcgatgatgatgttcagttacgccgccttatggcacgtaacgggtttaccgaagaagaagctctggcccgcattcgttcacagtggcccagtgccgagaaagttaaacgtgcagacgctgtaatcgacaataatggcacgattgaagaaacccgccgccagctgctggccattttacaccagtgggatgcactgggtaagggtggctccggccaccatcatcaccatcac

SEQ ID NO: 432 - protein, 211 aa, synthetic construct
  REGION 1..211: note = Variant of 3'O-kinase
MAFTIGLTGGIASGKSTVSAMMRELGLPVIDADEAARAVVRPGEEAYRQIVAAFGPGILRADGEIDRAKLGAIVFADEQQRKVLNAIVGPAVFKKMLAEKEAHIRSGAKTVVLDIPLLFESGLTHWVDKVLVVYVDDDVQLRRLMARNGFTEEEALARIRSQWPSAEKVKRADAVIDNNGTIEETRRQLLAILHQWDALGKGGSGHHHHHH

SEQ ID NO: 433 - DNA, 633 bp, synthetic construct
  misc_feature 1..633: note = Variant of 3'O-kinase
  source 1..633: mol_type = other DNA
atggcgtttaccattggtttaacaggagggatcgcatcgggcaaatcgactgtgagtgccatgatgcgtgaactgggtctgccggtcatcgatgctgacgaggcagcacgcgccgttgttcgtccaggcgaagaagcttatcgccagattgtagctgcgttcggtccgggcattcttcgtgccgatggcgagatcgatcgcgccaaattgggtgctatcgtgtttgctgacgaacaacaacgtaaggtgctgaatgcgattgtaggtcctgcagtctataagaagatgctcgctgagaaagaagctcatatccgctcaggcgccaagacggttgtgctggatatcccgctgctgttcgaatccggattgacccattgggtcgacaaagtgctcgtggtgtacgtcgatgatgatgttcagttacgccgccttatggcacgtaacgggtttaccgaagaagaagctctggcccgcattcgttcacagtggcccagtgccgagaaagttaaacgtgcagacgctgtaatcgacaataatggcacgattgaagaaacccgccgccagctgctggccattttacaccagtgggatgcactggagaagggtggctccggccaccatcatcaccatcac

SEQ ID NO: 434 - protein, 211 aa, synthetic construct
  REGION 1..211: note = Variant of 3'O-kinase
MAFTIGLTGGIASGKSTVSAMMRELGLPVIDADEAARAVVRPGEEAYRQIVAAFGPGILRADGEIDRAKLGAIVFADEQQRKVLNAIVGPAVYKKMLAEKEAHIRSGAKTVVLDIPLLFESGLTHWVDKVLVVYVDDDVQLRRLMARNGFTEEEALARIRSQWPSAEKVKRADAVIDNNGTIEETRRQLLAILHQWDALEKGGSGHHHHHH

SEQ ID NO: 435 - DNA, 633 bp, synthetic construct
  misc_feature 1..633: note = Variant of 3'O-kinase
  source 1..633: mol_type = other DNA
atggcgtttaccattggtttaacaggagggatcgcatcgggcaaatcgactgtgagtgccatgatgcgtgaactgggtctgccggtcatcgatgctgacgaggcagcacgcgccgttgttcgtccaggcgaagaagcttatcgccagattgtagctgcgttcggtccgggcattcttcgtgccgatggcgagatcgatcgcgccaaattgggtgctatcgtgtttgctgacgaacaacaacgtaaggtgctgaatgcgattgtaggtcctgcagtctataagaagatgctcgctgagaaagaagctcatatccgctcaggcgccaagacggttgtgctggatatcccgctgctgttcgaatccggattgacccattgggtcgacaaagtgctcgtggtgtacgtcgatgatgatgttcagttacgccgccttatggcacgtaacgggtttaccgaagaagaagctctggcccgcattcgttcacagtggcccagtgccgagaaagttaaacgtgcagacgctgtaatcgacaataatggcacgattgaagaaacccgccgccagctgctggccattttacaccagtgggatgcactgggtaagggtggctccggccaccatcatcacgttcac

SEQ ID NO: 436 - protein, 211 aa, synthetic construct
  REGION 1..211: note = Variant of 3'O-kinase
MAFTIGLTGGIASGKSTVSAMMRELGLPVIDADEAARAVVRPGEEAYRQIVAAFGPGILRADGEIDRAKLGAIVFADEQQRKVLNAIVGPAVYKKMLAEKEAHIRSGAKTVVLDIPLLFESGLTHWVDKVLVVYVDDDVQLRRLMARNGFTEEEALARIRSQWPSAEKVKRADAVIDNNGTIEETRRQLLAILHQWDALGKGGSGHHHHVH

SEQ ID NO: 437 - DNA, 633 bp, synthetic construct
  misc_feature 1..633: note = Variant of 3'O-kinase
  source 1..633: mol_type = other DNA
atggcgtttaccattggtttaacaggagggatcgcatcgggcaaatcgactgtgagtgccatgatgcgtgaactgggtctgccggtcatcgatgctgacgaggcagcacgcgccgttgttcgtccaggcgaagaagcttatcgccagattgtagctgcgttcggtccgggcattcttcgtgccgatggcgagatcgatcgcgccaaattgggtgctatcgtgtttgctgacgaacaacaacgtaagatgctgaatgcgattgtaggtcctgcagtctataagaagatgctcgctgagaaagaagctcatatccgctcaggcgccaagacggttgtgctggatatcccgctgctgttcgaatccggattgacccattgggtcgacaaagtgctcgtggtgtacgtcgatgatgatgttcagttacgccgccttatggcacgtaacgggtttaccgaagaagaagctctggcccgcattcgttcacagtggcccagtgccgagaaagttaaacgtgcagacgctgtaatcgacaataatggcacgattgaagaaacccgccgccagctgctggccattttacaccagtgggatgcactgggtaagggtggctccggccaccatcatcaccatcac

SEQ ID NO: 438 - protein, 211 aa, synthetic construct
  REGION 1..211: note = Variant of 3'O-kinase
MAFTIGLTGGIASGKSTVSAMMRELGLPVIDADEAARAVVRPGEEAYRQIVAAFGPGILRADGEIDRAKLGAIVFADEQQRKMLNAIVGPAVYKKMLAEKEAHIRSGAKTVVLDIPLLFESGLTHWVDKVLVVYVDDDVQLRRLMARNGFTEEEALARIRSQWPSAEKVKRADAVIDNNGTIEETRRQLLAILHQWDALGKGGSGHHHHHH

SEQ ID NO: 439 - DNA, 633 bp, synthetic construct
  misc_feature 1..633: note = Variant of 3'O-kinase
  source 1..633: mol_type = other DNA
atggcgtttaccattggtttaacaggagggatcgcatcgggcaaatcgactgtgagtgccatgatgcgtgaactgggtctgccggtcatcgatgctgacgaggcagcacgcgccgttgttcgtccaggcgaagaagcttatcgccagattgtagctgcgttcggtccgggcattcttcgtgccgatggcgagatcgatcgcgccaaattgggtgctatcgtgtttgctgacgaacaacaacgtaaggtgctgaatgcgattgtaggtcctgcagtctataagaagatgctcgctgagaaagaagcttatatccgctcaggcgccaagacggttgtgctggatatcccgctgctgttcgaatccggattgacccattgggtcgacaaagtgctcgtggtgtacgtcgatgatgatgttcagttacgccgccttatggcacgtaacgggtttaccgaagaagaagctctggcccgcattcgttcacagtggcccagtgccgagaaagttaaacgtgcagacgctgtaatcgacaataatggcacgattgaagaaacccgccgccagctgctggccattttacaccagtgggatgcactgggtaagggtggctccggccaccatcatcaccatcac

SEQ ID NO: 440 - protein, 211 aa, synthetic construct
  REGION 1..211: note = Variant of 3'O-kinase
MAFTIGLTGGIASGKSTVSAMMRELGLPVIDADEAARAVVRPGEEAYRQIVAAFGPGILRADGEIDRAKLGAIVFADEQQRKVLNAIVGPAVYKKMLAEKEAYIRSGAKTVVLDIPLLFESGLTHWVDKVLVVYVDDDVQLRRLMARNGFTEEEALARIRSQWPSAEKVKRADAVIDNNGTIEETRRQLLAILHQWDALGKGGSGHHHHHH

SEQ ID NO: 441 - DNA, 633 bp, synthetic construct
  misc_feature 1..633: note = Variant of 3'O-kinase
  source 1..633: mol_type = other DNA
atggcgtttaccattggtttaacaggagggatcgcatcgggcaaatcgactgtgagtgccatgatgcgtgaactgggtctgccggtcatcgatgctgacgaggcagcacgcgccgttgttcgtccaggcgaagaagcttatcgccagattgtagctgcgttcggtccgggcattcttcgtgccgatggcgagatcgatcgcgccaaattgggtgctatcgtgtttgctgacgaacaacaacgtaaggtgctgaatgcgattgtaggtcctgcagtctataagaagatgctcgctgagaaagaagctcatatccgctcaggcgccaagacggttgtgctggatatcccgctgctgttcgaatccggattgacccattgggtcgacaaagtgctcgtggtgtacgtcgatgatgatgttcagttacgccgccttatggcacgtaacgggtttaccgaagaagaagctctggcccgcattcgttcacagtggcccagtgccgagaaagttaaacgtgcagacgctgtaatcgacaataatggcacgattgaagaaacccgccgccagctgctggccattttacaccagtgggatgcactgggtaagggtggctccggccaccatcatcacactcac

SEQ ID NO: 442 - protein, 211 aa, synthetic construct
  REGION 1..211: note = Variant of 3'O-kinase
MAFTIGLTGGIASGKSTVSAMMRELGLPVIDADEAARAVVRPGEEAYRQIVAAFGPGILRADGEIDRAKLGAIVFADEQQRKVLNAIVGPAVYKKMLAEKEAHIRSGAKTVVLDIPLLFESGLTHWVDKVLVVYVDDDVQLRRLMARNGFTEEEALARIRSQWPSAEKVKRADAVIDNNGTIEETRRQLLAILHQWDALGKGGSGHHHHTH

SEQ ID NO: 443 - DNA, 633 bp, synthetic construct
  misc_feature 1..633: note = Variant of 3'O-kinase
  source 1..633: mol_type = other DNA
atggcgtttaccattggtttaacaggagggatcgcatcgggcaaatcgactgtgagtgccatgatgcgtgaactgggtctgccggtcatcgatgctgacgaggcagcacgcgccgttgttcgtccaggcgaagaagcttatcgccagattgtagctgcgttcggtccgggcattcttcgtgccgatggcgagatcgatcgcaggaaattgggtgctatcgtgtttgctgacgaacaacaacgtaaggtgctgaatgcgattgtaggtcctgcagtctataagaagatgctcgctgagaaagaagctcatatccgctcaggcgccaagacggttgtgctggatatcccgctgctgttcgaatccggattgacccattgggtcgacaaagtgctcgtggtgtacgtcgatgatgatgttcagttacgccgccttatggcacgtaacgggtttaccgaagaagaagctctggcccgcattcgttcacagtggcccagtgccgagaaagttaaacgtgcagacgctgtaatcgacaataatggcacgattgaagaaacccgccgccagctgctggccattttacaccagtgggatgcactgggtaagggtggctccggccaccatcatcaccatcac

SEQ ID NO: 444 - protein, 211 aa, synthetic construct
  REGION 1..211: note = Variant of 3'O-kinase
MAFTIGLTGGIASGKSTVSAMMRELGLPVIDADEAARAVVRPGEEAYRQIVAAFGPGILRADGEIDRRKLGAIVFADEQQRKVLNAIVGPAVYKKMLAEKEAHIRSGAKTVVLDIPLLFESGLTHWVDKVLVVYVDDDVQLRRLMARNGFTEEEALARIRSQWPSAEKVKRADAVIDNNGTIEETRRQLLAILHQWDALGKGGSGHHHHHH

SEQ ID NO: 445 - DNA, 633 bp, synthetic construct
  misc_feature 1..633: note = Variant of 3'O-kinase
  source 1..633: mol_type = other DNA
atggcgtttaccattggtttaacaggagggatcgcatcgggcaaatcgactgtgagtgccatgatgcgtgaactgggtctgccggtcatcgatgctgacgaggcagcacgcgccgttgttcgtccaggcgaagaagcttatcgccagattgtagctgcgttcggtccgggcattcttcgtgccgatggcgagatcgatcgcgccaaattgggtgctatcgtgtttgctgacgaacaacaacgtaaggtgctgaatgcgattgtaggtcctgaggtctataagaagatgctcgctgagaaagaagctcatatccgctcaggcgccaagacggttgtgctggatatcccgctgctgttcgaatccggattgacccattgggtcgacaaagtgctcgtggtgtacgtcgatgatgatgttcagttacgccgccttatggcacgtaacgggtttaccgaagaagaagctctggcccgcattcgttcacagtggcccagtgccgagaaagttaaacgtgcagacgctgtaatcgacaataatggcacgattgaagaaacccgccgccagctgctggccattttacaccagtgggatgcactgggtaagggtggctccggccaccatcatcaccatcac

SEQ ID NO: 446 - protein, 211 aa, synthetic construct
  REGION 1..211: note = Variant of 3'O-kinase
MAFTIGLTGGIASGKSTVSAMMRELGLPVIDADEAARAVVRPGEEAYRQIVAAFGPGILRADGEIDRAKLGAIVFADEQQRKVLNAIVGPEVYKKMLAEKEAHIRSGAKTVVLDIPLLFESGLTHWVDKVLVVYVDDDVQLRRLMARNGFTEEEALARIRSQWPSAEKVKRADAVIDNNGTIEETRRQLLAILHQWDALGKGGSGHHHHHH

SEQ ID NO: 447 - DNA, 633 bp, synthetic construct
  misc_feature 1..633: note = Variant of 3'O-kinase
  source 1..633: mol_type = other DNA
atggcgtttaccattggtttaacaggagggatcgcatcgggcaaatcgactgtgagtgccatgatgcgtgaactgggtctgccggtcatcgatgctgacgaggcagcacgcgccgttgttcgtccaggcgaagaagcttatcgccagattgtagctgcgttcggtccgggcattcttcgtgccgatggcgagatcgatcgcgccaaattgggtgctatcgtgtttgctgacgaacaacaacgtaaggtgctgaatgcgattgtaggtcctgcagtctataagaagatgctcgctgagaaagaagctcatatccgctcaggcgccaagacggttgtgctggatatcccgctgctgttcgaatccggattgacccattgggtcgacaaagtgctcgtggtgtacgtcgatgatgatgttcagttacgccgccttatggcacgtaacgggtttaccgaagaagaagctctggcccgcattcgttcacagtggcccagtgccgagaaaattaaacgtgcagacgctgtaatcgacaataatggcacgattgaagaaacccgccgccagctgctggccattttacaccagtgggatgcactgggtaagggtggctccggccaccatcatcaccatcac

SEQ ID NO: 448 - protein, 211 aa, synthetic construct
  REGION 1..211: note = Variant of 3'O-kinase
MAFTIGLTGGIASGKSTVSAMMRELGLPVIDADEAARAVVRPGEEAYRQIVAAFGPGILRADGEIDRAKLGAIVFADEQQRKVLNAIVGPAVYKKMLAEKEAHIRSGAKTVVLDIPLLFESGLTHWVDKVLVVYVDDDVQLRRLMARNGFTEEEALARIRSQWPSAEKIKRADAVIDNNGTIEETRRQLLAILHQWDALGKGGSGHHHHHH

SEQ ID NO: 449 - DNA, 633 bp, synthetic construct
  misc_feature 1..633: note = Variant of 3'O-kinase
  source 1..633: mol_type = other DNA
atggcgtttaccattggtttaacaggagggatcgcagcgggcaaatcgactgtgagtgccatgatgcgtgaactgggtctgccggtcatcgatgctgacgaggcagcacgcgccgttatgcgtccaggcgaagaagcttatcgccagattgtagctgcgttcggtccgggcattcttcgtgccgatggcgagatcgatcgccagaaactgggtgctatccgcttttcggacgaacaacaacgtaaggtgctgaatgcgattgtaggtcctgcagtcctgaagaagatgctcgctgagaaagaagctcatatccgctcaggcgccaagacggttgtgctggatatcccgctgctgttcgaatccggattgacccattgggtcgacaaagtgctcgtggtgtacgtcgatgatgatgttcagttacgccgccttatggcacgtaacgggtttactgaagaagaagctctgaagcgcattcgttcacagtggcccagtgcggagaaagttaaacgtgcagacgctgtcatcgacaataatggcacgattgaagaaacccgccgccagctgctggccattttacaccagtgggatctgctgggtaagggtggctccggccaccatcatcaccatcac

SEQ ID NO: 450 - protein, 211 aa, synthetic construct
  REGION 1..211: note = Variant of 3'O-kinase
MAFTIGLTGGIAAGKSTVSAMMRELGLPVIDADEAARAVMRPGEEAYRQIVAAFGPGILRADGEIDRQKLGAIRFSDEQQRKVLNAIVGPAVLKKMLAEKEAHIRSGAKTVVLDIPLLFESGLTHWVDKVLVVYVDDDVQLRRLMARNGFTEEEALKRIRSQWPSAEKVKRADAVIDNNGTIEETRRQLLAILHQWDLLGKGGSGHHHHHH

SEQ ID NO: 451 - DNA, 633 bp, synthetic construct
  misc_feature 1..633: note = Variant of 3'O-kinase
  source 1..633: mol_type = other DNA
atggcgtttaccattggtttaacaggagggatcgcagcgggcaaatcgactgtgagtgccatgatgcgtgaactgggtctgccggtcatcgatgctgacgaggcagcacgcgccgttatgcgtccaggcgaagaagcttatcgccagattgtagctgcgttcggtccgggcattcttcgtgccgatggcgagatcgatcgccgtaaactgggtgctatcgttttttcggacgaacaacaacgtaaggtgctgaatgcgattgtaggtcctgcagtccagaagaagatgctcgctgagaaagaagctcatatccgctcaggcgccaagacggttgtgctggatatcccgctgctgttcgaatccggattgacccattgggtcgacaaagtgctcgtggtgtacgtcgatgatgatgttcagttacgccgccttatggcacgtaacgggtttactgaagaagaagctctgaagcgcattcgttcacagtggcccagtgcggagaaagttaaacgtgcagacgctgtaatcgacaataatggcacgattgaagaaacccgccgccagctgctggccattttacaccagtgggatctgctgggtaagggtggctccggccaccatcatcaccatcac

SEQ ID NO: 452 - protein, 211 aa, synthetic construct
  REGION 1..211: note = Variant of 3'O-kinase
MAFTIGLTGGIAAGKSTVSAMMRELGLPVIDADEAARAVMRPGEEAYRQIVAAFGPGILRADGEIDRRKLGAIVFSDEQQRKVLNAIVGPAVQKKMLAEKEAHIRSGAKTVVLDIPLLFESGLTHWVDKVLVVYVDDDVQLRRLMARNGFTEEEALKRIRSQWPSAEKVKRADAVIDNNGTIEETRRQLLAILHQWDLLGKGGSGHHHHHH

SEQ ID NO: 453 - DNA, 633 bp, synthetic construct
  misc_feature 1..633: note = Variant of 3'O-kinase
  source 1..633: mol_type = other DNA
atggcgtttaccattggtttaacaggagggatcgcagagggcaaatcgactgtgagtgccatgatgcgtgaactgggtctgccggtcatcgatgctgacgaggcagcacgcgccgttatgcgtccaggcgaagaagcttatcgccagattgtagctgcgttcggtccgggcattcttcgtgccgatggcgagatcgatcgccgtaaactgggtgctatcgtgtttagtgacgaacaacaactgaaggtgctgaatgcgattgtaggtcctgcagtccagaagaagatgctcgctgagaaagaagctcatatccgctcaggcgccaagacggttgtgctggatatcccgctgctgttcgaatccggattgacccattgggtcgacaaagtgctcgtggtgtacgtcgatgatgatgttcagttacgccgccttatggcacgtaacgggtttactgaagaagaagctctggcgcgcattcgttcacagtggcccagtgcggagaaagttaaacgtgcagacgctgtaatcgacaataatggcacgattgaagaaacccgccgccagctgctggccattttacaccagtgggatctgctgggtaagggtggctccggccaccatcatcaccatcac

SEQ ID NO: 454 - protein, 211 aa, synthetic construct
  REGION 1..211: note = Variant of 3'O-kinase
MAFTIGLTGGIAEGKSTVSAMMRELGLPVIDADEAARAVMRPGEEAYRQIVAAFGPGILRADGEIDRRKLGAIVFSDEQQLKVLNAIVGPAVQKKMLAEKEAHIRSGAKTVVLDIPLLFESGLTHWVDKVLVVYVDDDVQLRRLMARNGFTEEEALARIRSQWPSAEKVKRADAVIDNNGTIEETRRQLLAILHQWDLLGKGGSGHHHHHH

SEQ ID NO: 455 - DNA, 633 bp, synthetic construct
  misc_feature 1..633: note = Variant of 3'O-kinase
  source 1..633: mol_type = other DNA
atggcgtttaccattggtttaacaggagggatcgcagcgggcaaatcgactgtgagtgccatgatgcgtgaactgggtctgccggtcatcgatgctgacgaggcagcacgcgccgttatgcgtccaggcgaagaagcttatcgccagattgtagctgcgttcggtccgggcattcttcgtgccgatggcgagatcgatcgccagaaactgggtcagatccgcttttcggacgaacaacaacgtgaggtgctgaatgcgattgtaggtcctgaagtcctgaagaagatgctcgctgagaaagaagctcatatccgctcaggcgccaagacggttgtgctggatatcccgctgctgttcgaatccggattgagccattgggtcgacaaagtgctcgtggtgtacgtcgatgatgatgttcagttacgccgccttatggcacgtaacgggtttactgaagaagaagctctgaagcgcattcgttcacagtggcccagtgaagagaaagttaaacgtgcagacgctgtcatcgacaataatggcacggaggaagaaacccgccgccagctgctggccattttacaccagtgggatctgctgggtaagggtggctccggccaccatcatcaccatcac

SEQ ID NO: 456 - protein, 211 aa, synthetic construct
  REGION 1..211: note = Variant of 3'O-kinase
MAFTIGLTGGIAAGKSTVSAMMRELGLPVIDADEAARAVMRPGEEAYRQIVAAFGPGILRADGEIDRQKLGQIRFSDEQQREVLNAIVGPEVLKKMLAEKEAHIRSGAKTVVLDIPLLFESGLSHWVDKVLVVYVDDDVQLRRLMARNGFTEEEALKRIRSQWPSEEKVKRADAVIDNNGTEEETRRQLLAILHQWDLLGKGGSGHHHHHH

SEQ ID NO: 457 - DNA, 633 bp, synthetic construct
  misc_feature 1..633: note = Variant of 3'O-kinase
  source 1..633: mol_type = other DNA
atggcgtttaccattggtttaacaggagggatcgcagcgggcaaatcgactgtgagtgccatgatgcgtgaactgggtctgccggtcatcgatgctgacgaggcagcacgcgccgttatgcgtccaggcgaagaagcttatcatcagattgtagctgcgttcggtccgggcattcttcgtgccgatggcgagatcgatcgccagaaactgggtgctatccgcttttcggacgaacaacaacgcaaggtgctgaatgcgattgtaggtcctgcagtcctgaagaagatgctcgctgagaaagaagctcacatccgctcaggcgccaagacggttgtgctggatatcccgctgctgttcgaatccggattgacccattgggtcgacaaagtgctcgtggtgtacgatgatgatgatgttcagttacgccgccttatggcacgtaacgggtttactgaagaagaagctctgaagcgcattcgttcacagtggcccagtgcggagaaagttaaacgtgcagacgctgtgatcgacaataatggcacgattgaagaaacccgccgccagctgctggccattttacaccagtgggatctgctggagaagggtggctccggccaccatcatcaccatcac

SEQ ID NO: 458 - protein, 211 aa, synthetic construct
  REGION 1..211: note = Variant of 3'O-kinase
MAFTIGLTGGIAAGKSTVSAMMRELGLPVIDADEAARAVMRPGEEAYHQIVAAFGPGILRADGEIDRQKLGAIRFSDEQQRKVLNAIVGPAVLKKMLAEKEAHIRSGAKTVVLDIPLLFESGLTHWVDKVLVVYDDDDVQLRRLMARNGFTEEEALKRIRSQWPSAEKVKRADAVIDNNGTIEETRRQLLAILHQWDLLEKGGSGHHHHHH

SEQ ID NO: 459 - DNA, 633 bp, synthetic construct
  misc_feature 1..633: note = Variant of 3'O-kinase
  source 1..633: mol_type = other DNA
atggcgtttaccattggtttaacaggagggatcgcagcgggcaaatcgactgtgagtgccatgatgcgtgaactgggtctgccggtcatcgatgctgacgaggcagcacgcgccgttatgcgtccaggcgaagaagcttatcgccagattgtagctgcgttcggtccgggcattcttcgtgccgatggcgagatcgatcgccagaaactgggtgcgatccgcttttcggacgaacaacaacgtaaggtgctgaatgcgattgtgggtcctgaagtcctgaagaagatgctcgctgagaaagaagctcatatccgctcaggcgccaagacggttgtgctggatatcccgctgctgttcgaatccggattgcagcattgggtcgacaaagtgctcgtggtgtacgtcgatgatgatgttcagttacgccgccttatggcacgtaacgggtttactgaagaagaagctctgaagcgcattcgttcacagtggcccagtgaagagaaagttaaacgtgcagacgctgtcatcgacaataatggcacggaggaagaaacccgccgccagctgctggccattttacaccagtgggatctgctgggtaatggtggctccggccaccatcatcaccatcac

SEQ ID NO: 460 - protein, 211 aa, synthetic construct
  REGION 1..211: note = Variant of 3'O-kinase
MAFTIGLTGGIAAGKSTVSAMMRELGLPVIDADEAARAVMRPGEEAYRQIVAAFGPGILRADGEIDRQKLGAIRFSDEQQRKVLNAIVGPEVLKKMLAEKEAHIRSGAKTVVLDIPLLFESGLQHWVDKVLVVYVDDDVQLRRLMARNGFTEEEALKRIRSQWPSEEKVKRADAVIDNNGTEEETRRQLLAILHQWDLLGNGGSGHHHHHH

SEQ ID NO: 461 - DNA, 633 bp, synthetic construct
  misc_feature 1..633: note = Variant of 3'O-kinase
  source 1..633: mol_type = other DNA
atggcgtttaccattggtttaacaggagggatcgcagcgggcaaatcgactgtgagtgccatgatgcgtgaactgggtctgccggtcatcgatgctgacgaggcagcacgcgccgttatgcgtccaggcgaagaagcttatcgccagattgtagctgcgttcggtccgggcattcttcgtgccgatggcgagatcgatcgccagaaactgggtgcgatccgcttttcggacgaacaacaacgtgaggtgctgaatgcgattctgggtcctgaagtcctgaagaagatgctcgctgagaaagaagctcatatccgctcaggcgccaagacggttgtgctggatatcccgctgctgttcgaatccggattgacccattgggtcgacaaagtgctcgtggtgtacgtcgatgatgatgttcagttacgccgccttatggcacgtaacgggtttactgaagaagaagctctgaagcgcattcgttcacagtggcccagtgcagagaaagttaaacgtgcagacgctgtcatcgacaataatggcacggaggaagaaacccgccgccagctgctggccattttacaccagtgggatctgctgggtaagggtggctccggccaccatcatcaccatcac

SEQ ID NO: 462 - protein, 211 aa, synthetic construct
  REGION 1..211: note = Variant of 3'O-kinase
MAFTIGLTGGIAAGKSTVSAMMRELGLPVIDADEAARAVMRPGEEAYRQIVAAFGPGILRADGEIDRQKLGAIRFSDEQQREVLNAILGPEVLKKMLAEKEAHIRSGAKTVVLDIPLLFESGLTHWVDKVLVVYVDDDVQLRRLMARNGFTEEEALKRIRSQWPSAEKVKRADAVIDNNGTEEETRRQLLAILHQWDLLGKGGSGHHHHHH

SEQ ID NO: 463 - DNA, 633 bp, synthetic construct
  misc_feature 1..633: note = Variant of 3'O-kinase
  source 1..633: mol_type = other DNA
atggcgtttaccattggtttaacaggagggatcgcagcgggcaaatcgactgtgagtgccatgatgcgtgaactgggtctgccggtcatcgatgctgacgaggcagcacgcgccgttatgcgtccaggcgaagaagcttatcgccagattgtagctgcgttcggtccgggcattcttcgtgccgatggcgagatcgatcgccagaaactgggtgcgatccgcttttcggacgaacaacaacgtacggtgctgaatgcgattgtaggtcctgcagtcctgaagaagatgctcgctgagaaagaagctcatatccgctcaggcgccaagacggttgtgctggatatcccgctgctgttcgaatccggattgacccattgggtcgacaaagtgctcgtggtgtacgtcgatgatgatgttcagttacgccgccttatggcacgtaacgggtttactgaagaagaagctctgaagcgcattcgttcacagtggcccagtgcggagaaagttaaacgtgcagacgctgtcatcgacaataatggcacgattgaagaaacccgccgccagctgctggccattttacaccagtgggatctgctgggtaagggtggctccggccaccatcatcaccatcac

SEQ ID NO: 464 - protein, 211 aa, synthetic construct
  REGION 1..211: note = Variant of 3'O-kinase
MAFTIGLTGGIAAGKSTVSAMMRELGLPVIDADEAARAVMRPGEEAYRQIVAAFGPGILRADGEIDRQKLGAIRFSDEQQRTVLNAIVGPAVLKKMLAEKEAHIRSGAKTVVLDIPLLFESGLTHWVDKVLVVYVDDDVQLRRLMARNGFTEEEALKRIRSQWPSAEKVKRADAVIDNNGTIEETRRQLLAILHQWDLLGKGGSGHHHHHH

SEQ ID NO: 465 - DNA, 633 bp, synthetic construct
  misc_feature 1..633: note = Variant of 3'O-kinase
  source 1..633: mol_type = other DNA
atggcgtttaccattggtttaacaggagggatcgcagcgggcaaatcgactgtgagtgccatgatgcgtgaactgggtctgccggtcatcgatgctgacgaggcagcacgcgccgttatgcgtccaggcgaagaagcttatcgtcagattgtagctgcgttcggtccgggcattcttcgtgccgatggcgagatcgatcgccagaaactgggtgctatccgcttttcggacgaacaacaacgcaaggtgctgaatgcgattgtaggtcctgcagtcctgaagaagatgctcgctgagaaagaagctcatatccgctcaggcgccaagacggttgtgctggatatcccgctgctgttcgaatccggattgacccattgggtcgacaaagtgctcgtggtgtacgatgatgatgatgttcagttacgccgccttatggcacgtaacgggtttactgaagaagaagctctgaagcgcattcgttcacagtggcccagtgcggagaaagttaaacgtgcagacgctgtcatcgacaataatggcacgattgaagaaacccgccgccagctgctggccattttacaccagtgggatctgctggagaagggtggctccggccaccatcatcaccatcac

SEQ ID NO: 466 - protein, 211 aa, synthetic construct
  REGION 1..211: note = Variant of 3'O-kinase
MAFTIGLTGGIAAGKSTVSAMMRELGLPVIDADEAARAVMRPGEEAYRQIVAAFGPGILRADGEIDRQKLGAIRFSDEQQRKVLNAIVGPAVLKKMLAEKEAHIRSGAKTVVLDIPLLFESGLTHWVDKVLVVYDDDDVQLRRLMARNGFTEEEALKRIRSQWPSAEKVKRADAVIDNNGTIEETRRQLLAILHQWDLLEKGGSGHHHHHH

SEQ ID NO: 467 - DNA, 633 bp, synthetic construct
  misc_feature 1..633: note = Variant of 3'O-kinase
  source 1..633: mol_type = other DNA
atggcgtttaccattggtttaacaggagggatcgcagcgggcaaatcgactgtgagtgccatgatgcgtgaactgggtctgccggtcatcgatgctgacgaggcagcacgcgccgttatgcgtccaggcgaagaagcttatcatcagattgtagctgcgttcggtccgggcattcttcgtgccgatggcgagatcgatcgccagaaactgggtgctatccgcttttcggacgaacaacaacgcaaggtgctgaatgcgattgtaggtcctgcagtcctgaagaagatgctcgctgagaaagaagctcatatccgctcaggcgccaagacggttgtgctggatatcccgctgctgttcgaatccggattgacccattgggtcgacaaagtgctcgtggtgtacgatgatgatgatgttcagttacgccgccttatggcacgtaacgggtttactgaagaagaagctctgaagcgcattcgttcacagtggcccagtgcggagaaagttaaacgtgcagacgctgtgatcgacaataatggcacgattgaagaaacccgccgccagctgctggccattttacaccagtgggatctgctgggtaagggtggctccggccaccatcatcaccatcac

SEQ ID NO: 468 - protein, 211 aa, synthetic construct
  REGION 1..211: note = Variant of 3'O-kinase
MAFTIGLTGGIAAGKSTVSAMMRELGLPVIDADEAARAVMRPGEEAYHQIVAAFGPGILRADGEIDRQKLGAIRFSDEQQRKVLNAIVGPAVLKKMLAEKEAHIRSGAKTVVLDIPLLFESGLTHWVDKVLVVYDDDDVQLRRLMARNGFTEEEALKRIRSQWPSAEKVKRADAVIDNNGTIEETRRQLLAILHQWDLLGKGGSGHHHHHH

SEQ ID NO: 469 - DNA, 633 bp, synthetic construct
  misc_feature 1..633: note = Variant of 3'O-kinase
  source 1..633: mol_type = other DNA
atggcgtttaccattggtttaacaggagggatcgcagcgggcaaatcgactgtgagtgccatgatgcgtgaactgggtctgccggtcatcgatgctgacgaggcagcacgcgccgttatgcgtccaggcgaagaagcttatcgccagattgtagctgcgttcggtccgggcattcttcgtgccgatggcgagatcgatcgccagaaactgggtgcgatccgcttttcggacgaacaacaacgtgaggtgctgaatgcgattgtaggtcctgcagtcctgaagaagatgctcgctgagaaagaagctcatatccgctcaggcgccaagacggttgtgctggatatcccgctgctgttcgaatccggattgacccattgggtcgacaaagtgctcgtggtgtacgtcgatgatgatgttcagttacgccgccttatggcacgtaacgggtttactgaagaagaagctctgaagcgcattcgttcacagtggcccagtgaagagaaagttaaacgtgcagacgctgtcatcgacaataatggcacggaggaagaaacccgccgccagctgctggccattttacaccagtgggatctgctgggtaagggtggctccggccaccatcatcaccatcac

SEQ ID NO: 470 - protein, 211 aa, synthetic construct
  REGION 1..211: note = Variant of 3'O-kinase
MAFTIGLTGGIAAGKSTVSAMMRELGLPVIDADEAARAVMRPGEEAYRQIVAAFGPGILRADGEIDRQKLGAIRFSDEQQREVLNAIVGPAVLKKMLAEKEAHIRSGAKTVVLDIPLLFESGLTHWVDKVLVVYVDDDVQLRRLMARNGFTEEEALKRIRSQWPSEEKVKRADAVIDNNGTEEETRRQLLAILHQWDLLGKGGSGHHHHHH

SEQ ID NO: 471 - DNA, 633 bp, synthetic construct
  misc_feature 1..633: note = Variant of 3'O-kinase
  source 1..633: mol_type = other DNA
atggcgtttaccattggtttaacaggagggatcgcagcgggcaaatcgactgtgagtgccatgatgcgtgaactgggtctgccggtcatcgatgctgacgaggcagcacgcgccgttatgcgtccaggcgaagaagcttatcgccagattgtagctgcgttcggtccgggcattcttcgtgccgatggcgagatcgatcgccagaaactgggtgctatccgcttttcggacgaacaacaactgaaggtgctgaatgcgattgtaggtcctgcagtcctgaagaagatgctcgctgagaaagaagctcatatccgctcaggcgccaagacggttgtgctggatatcccgctgctgttcgaatccggattgacccattgggtcgacaaagtgctcgtggtgtacgatgatgatgatgttcagttacgccgccttatggcacgtaacgggtttactgaagaagaagctctgaagcgcattcgttcacagtggcccagtgcggagaaagttaaacgtgcagacgctgtgatcgacaataatggcacgattgaagaaacccgccgccagctgctggccattttacaccagtgggatctgctggataagggtggctccggccaccatcatcaccatcac

SEQ ID NO: 472 - protein, 211 aa, synthetic construct
  REGION 1..211: note = Variant of 3'O-kinase
MAFTIGLTGGIAAGKSTVSAMMRELGLPVIDADEAARAVMRPGEEAYRQIVAAFGPGILRADGEIDRQKLGAIRFSDEQQLKVLNAIVGPAVLKKMLAEKEAHIRSGAKTVVLDIPLLFESGLTHWVDKVLVVYDDDDVQLRRLMARNGFTEEEALKRIRSQWPSAEKVKRADAVIDNNGTIEETRRQLLAILHQWDLLDKGGSGHHHHHH

SEQ ID NO: 473 - DNA, 633 bp, synthetic construct
  misc_feature 1..633: note = Variant of 3'O-kinase
  source 1..633: mol_type = other DNA
atggcgtttaccattggtttaacaggagggatcgcagcgggcaaatcgactgtgagtgccatgatgcgtgaactgggtctgccggtcatcgatgctgacgaggcagcacgcgccgttatgcgtccaggcgaagaagcttatcgtcagattgtagctgcgttcggtccgggcattcttcgtgccgatggcgagatcgatcgccagaaactgggtgctatccgcttttcggacgaacaacaacgtaaggtgctgaatgcgattgtaggtcctgcagtcctgaagaagatgctcgctgagaaagaagctatcatccgctcaggcgccaagacggttgtgctggatatcccgctgctgttcgaatccggattgacccattgggtcgacaaagtgctcgtggtgtacgatgatgatgatgttcagttacgccgccttatggcacgtaacgggtttactgaagaagaagctctgaagcgcattcgttcacagtggcccagtgcggagaaagttaaacgtgcagacgctgtcatcgacaataatggcacgattgaagaaacccgccgccagctgctggccattttacaccagtgggatctgctgggtaagggtggctccggccaccatcatcaccatcac

SEQ ID NO: 474 - protein, 211 aa, synthetic construct
  REGION 1..211: note = Variant of 3'O-kinase
MAFTIGLTGGIAAGKSTVSAMMRELGLPVIDADEAARAVMRPGEEAYRQIVAAFGPGILRADGEIDRQKLGAIRFSDEQQRKVLNAIVGPAVLKKMLAEKEAIIRSGAKTVVLDIPLLFESGLTHWVDKVLVVYDDDDVQLRRLMARNGFTEEEALKRIRSQWPSAEKVKRADAVIDNNGTIEETRRQLLAILHQWDLLGKGGSGHHHHHH

SEQ ID NO: 475 - DNA, 633 bp, synthetic construct
  misc_feature 1..633: note = Variant of 3'O-kinase
  source 1..633: mol_type = other DNA
atggcgtttaccattggtttaacaggagggatcgcagcgggcaaatcgactgtgagtgccatgatgcgtgaactgggtctgccggtcatcgatgctgacgaggcagcacgcgccgttatgcgtccaggcgaagaagcttatcgccagattgtagctgcgttcggtccgggcattcttcgtgccgatggcgagatcgatcgccagaaactgggtgcgatccgcttttcggacgaacaacaacgtacggtgctgaatgcgattctgggtcctgcagtcctgaagaagatgctcgctgagaaagaagctcatatccgctcaggcgccaagacggttgtgctggatatcccgctgctgttcgaatccggattgcagcattgggtcgacaaagtgctcgtggtgtacgtcgatgatgatgttcagttacgccgccttatggcacgtaacgggtttactgaagaagaagctctgaagcgcattcgttcacagtggcccagtgaagagaaagttaaacgtgcagacgctgtcatcgacaataatggcacgatcgaagaaacccgccgccagctgctggccattttacaccagtgggatctgctgggtaagggtggctccggccaccatcatcaccatcac

SEQ ID NO: 476 - protein, 211 aa, synthetic construct
  REGION 1..211: note = Variant of 3'O-kinase
MAFTIGLTGGIAAGKSTVSAMMRELGLPVIDADEAARAVMRPGEEAYRQIVAAFGPGILRADGEIDRQKLGAIRFSDEQQRTVLNAILGPAVLKKMLAEKEAHIRSGAKTVVLDIPLLFESGLQHWVDKVLVVYVDDDVQLRRLMARNGFTEEEALKRIRSQWPSEEKVKRADAVIDNNGTIEETRRQLLAILHQWDLLGKGGSGHHHHHH

SEQ ID NO: 477 - DNA, 633 bp, synthetic construct
  misc_feature 1..633: note = Variant of 3'O-kinase
  source 1..633: mol_type = other DNA
atggcgtttaccattggtttaacaggagggatcgcagcgggcaaatcgactgtgagtgccatgatgcgtgaactgggtctgccggtcatcgatgctgacgaggcagcacgcgccgttatgcgtccaggcgaagaagcttatcgtcagattgtagctgcgttcggtccgggcattcttcgtgccgatggcgagatcgatcgccagaaactgggtgctatccgcttttcggacgaacaacaacgcaaggtgctgaatgcgattgtaggtcctgcagtcctgaagaagatgctcgctgagaaagaagctatgatccgctcaggcgccaagacggttgtgctggatatcccgctgctgttcgaatccggattgacccattgggtcgacaaagtgctcgtggtgtacgtcgatgatgatgttcagttacgccgccttatggcacgtaacgggtttactgaagaagaagctctgaagcgcattcgttcacagtggcccagtgcggagaaagttaaacgtgcagacgctgtcatcgacaataatggcacgattgaagaaacccgccgccagctgctggccattttacaccagtgggatctgctgggtaagggtggctccggccaccatcatcaccatcac

SEQ ID NO: 478 - protein, 211 aa, synthetic construct
  REGION 1..211: note = Variant of 3'O-kinase
MAFTIGLTGGIAAGKSTVSAMMRELGLPVIDADEAARAVMRPGEEAYRQIVAAFGPGILRADGEIDRQKLGAIRFSDEQQRKVLNAIVGPAVLKKMLAEKEAMIRSGAKTVVLDIPLLFESGLTHWVDKVLVVYVDDDVQLRRLMARNGFTEEEALKRIRSQWPSAEKVKRADAVIDNNGTIEETRRQLLAILHQWDLLGKGGSGHHHHHH

SEQ ID NO: 479 - DNA, 633 bp, synthetic construct
  misc_feature 1..633: note = Variant of 3'O-kinase
  source 1..633: mol_type = other DNA
atggcgtttaccattggtttaacaggagggatcgcagcgggcaaatcgactgtgagtgccatgatgcgtgaactgggtctgccggtcatcgatgctgacgaggcagcacgcgccgttatgcgtccaggcgaagaagcttatcatcagattgtagctgcgttcggtccgggcattcttcgtgccgatggcgagatcgatcgccagaaactgggtgctatccgcttttcggacgaacaacaacgcaaggtgctgaatgcgattgtaggtcctgcagtcctgaagaagatgctcgctgagaaagaagctcacatccgctcaggcgccaagacggttgtgctggatatcccgctgctgttcgaatccggattgacccattgggtcgacaaagtgctcgtggtgtacgatgatgatgatgttcagttacgccgccttatggcacgtaacgggtttactgaagaagaagctctgaagcgcattcgttcacagtggcccagtgcggagaaagttaaacgtgcagacgcttggatcgacaataatggcacgattgaagaaacccgccgccagctgctggccattttacaccagtgggatctgctgggtaagggtggctccggccaccatcatcaccatcac

SEQ ID NO: 480 - protein, 211 aa, synthetic construct
  REGION 1..211: note = Variant of 3'O-kinase
MAFTIGLTGGIAAGKSTVSAMMRELGLPVIDADEAARAVMRPGEEAYHQIVAAFGPGILRADGEIDRQKLGAIRFSDEQQRKVLNAIVGPAVLKKMLAEKEAHIRSGAKTVVLDIPLLFESGLTHWVDKVLVVYDDDDVQLRRLMARNGFTEEEALKRIRSQWPSAEKVKRADAWIDNNGTIEETRRQLLAILHQWDLLGKGGSGHHHHHH

SEQ ID NO: 481 - DNA, 633 bp, synthetic construct
  misc_feature 1..633: note = Variant of 3'O-kinase
  source 1..633: mol_type = other DNA
atggcgtttaccattggtttaacaggagggatcgcagcgggcaaatcgactgtgagtgccatgatgcgtgaactgggtctgccggtcatcgatgctgacgaggcagcacgcgccgttatgcgtccaggcgaagaagcttatcgtcagattgtagctgcgttcggtccgggcattcttcgtgccgatggcgagatcgatcgccagaaactgggtgctatccgcttttcggacgaacaacaacgtaaggtgctgaatgcgattgtaggtcctgcagtcctgaagaagatgctcgctgagaaagaagctcatatccgctcaggcgccaagacggttgtgctggatatcccgctgctgttcgaatccggattgacccattgggtcgacaaagtgctcgtggtgtacgatgatgatgatgttcagttacgccgccttatggcacgtaacgggtttactgaagaagaagctctgaagcgcattcgttcacagtggcccagtgcggagaaagttaaacgtgcagacgctgtgatcgacaataatggcacgattgaagaaacccgccgccagctgctggccattttacaccagtgggatctgctgggtaagggtggctccggccaccatcatcaccatcac

SEQ ID NO: 482 - protein, 211 aa, synthetic construct
  REGION 1..211: note = Variant of 3'O-kinase
MAFTIGLTGGIAAGKSTVSAMMRELGLPVIDADEAARAVMRPGEEAYRQIVAAFGPGILRADGEIDRQKLGAIRFSDEQQRKVLNAIVGPAVLKKMLAEKEAHIRSGAKTVVLDIPLLFESGLTHWVDKVLVVYDDDDVQLRRLMARNGFTEEEALKRIRSQWPSAEKVKRADAVIDNNGTIEETRRQLLAILHQWDLLGKGGSGHHHHHH

SEQ ID NO: 483 - DNA, 633 bp, synthetic construct
  misc_feature 1..633: note = Variant of 3'O-kinase
  source 1..633: mol_type = other DNA
atggcgtttaccattggtttaacaggagggatcgcagcgggcaaatcgactgtgagtgccatgatgcgtgaactgggtctgccggtcatcgatgctgacgaggcagcacgcgccgttatgcgtccaggcgaagaagcttatcgtcagattgtagctgcgttcggtccgggcattcttcgtgccgatggcgagatcgatcgccagaaactgggtgctatccgcttttcggacgaacaacaacgcaaggtgctgaatgcgattgtaggtcctgcagtcctgaagaagatgctcgctgagaaagaagctctgatccgctcaggcgccaagacggttgtgctggatatcccgctgctgttcgaatccggattgacccattgggtcgacaaagtgctcgtggtgtacgatgatgatgatgttcagttacgccgccttatggcacgtaacgggtttactgaagaagaagctctgaagcgcattcgttcacagtggcccagtgcggagaaagttaaacgtgcagacgctgtgatcgacaataatggcacgattgaagaaacccgccgccagctgctggccattttacaccagtgggatctgctgtgtaagggtggctccggccaccatcatcaccatcac

SEQ ID NO: 484 - protein, 211 aa, synthetic construct
  REGION 1..211: note = Variant of 3'O-kinase
MAFTIGLTGGIAAGKSTVSAMMRELGLPVIDADEAARAVMRPGEEAYRQIVAAFGPGILRADGEIDRQKLGAIRFSDEQQRKVLNAIVGPAVLKKMLAEKEALIRSGAKTVVLDIPLLFESGLTHWVDKVLVVYDDDDVQLRRLMARNGFTEEEALKRIRSQWPSAEKVKRADAVIDNNGTIEETRRQLLAILHQWDLLCKGGSGHHHHHH

SEQ ID NO: 485 - DNA, 633 bp, synthetic construct
  misc_feature 1..633: note = Variant of 3'O-kinase
  source 1..633: mol_type = other DNA
atggcgtttaccattggtttaacaggagggatcgcagcgggcaaatcgactgtgagtgccatgatgcgtgaactgggtctgccggtcatcgatgctgacgaggcagcacgcgccgttatgcgtccaggcgaagaagcttatcatcagattgtagctgcgttcggtccgggcattcttcgtgccgatggcgagatcgatcgccagaaactgggtgctatccgcttttcggacgaacaacaacgtaaggtgctgaatgcgattgtaggtcctgcagtcctgaagaagatgctcgctgagaaagaagctctgatccgctcaggcgccaagacggttgtgctggatatcccgctgctgttcgaatccggattgacccattgggtcgacaaagtgctcgtggtgtacgtcgatgatgatgttcagttacgccgccttatggcacgtaacgggtttactgaagaagaagctctgaagcgcattcgttcacagtggcccagtgcggagaaagttaaacgtgcagacgctgtgatcgacaataatggcacgattgaagaaacccgccgccagctgctggccattttacaccagtgggatctgctggagaagggtggctccggccaccatcatcaccatcac

SEQ ID NO: 486 - protein, 211 aa, synthetic construct
  REGION 1..211: note = Variant of 3'O-kinase
MAFTIGLTGGIAAGKSTVSAMMRELGLPVIDADEAARAVMRPGEEAYHQIVAAFGPGILRADGEIDRQKLGAIRFSDEQQRKVLNAIVGPAVLKKMLAEKEALIRSGAKTVVLDIPLLFESGLTHWVDKVLVVYVDDDVQLRRLMARNGFTEEEALKRIRSQWPSAEKVKRADAVIDNNGTIEETRRQLLAILHQWDLLEKGGSGHHHHHH

SEQ ID NO: 487 - DNA, 633 bp, synthetic construct
  misc_feature 1..633: note = Variant of 3'O-kinase
  source 1..633: mol_type = other DNA
atggcgtttaccattggtttaacaggagggatcgcagcgggcaaatcgactgtgagtgccatgatgcgtgaactgggtctgccggtcatcgatgctgacgaggcagcacgcgccgttatgcgtccaggcgaagaagcttatcatcagattgtagctgcgttcggtccgggcattcttcgtgccgatggcgagatcgatcgccagaaactgggtgctatccgcttttcggacgaacaacaactgaaggtgctgaatgcgattgtaggtcctgcagtcctgaagaagatgctcgctgagaaagaagctcacatccgctcaggcgccaagacggttgtgctggatatcccgctgctgttcgaatccggattgacccattgggtcgacaaagtgctcgtggtgtacgttgatgatgatgttcagttacgccgccttatggcacgtaacgggtttactgaagaagaagctctgaagcgcattcgttcacagtggcccagtgcggagaaagttaaacgtgcagacgctgtgatcgacaataatggcacgattgaagaaacccgccgccagctgctggccattttacaccagtgggatctgctgggtaagggtggctccggccaccatcatcaccatcac

SEQ ID NO: 488 - protein, 211 aa, synthetic construct
  REGION 1..211: note = Variant of 3'O-kinase
MAFTIGLTGGIAAGKSTVSAMMRELGLPVIDADEAARAVMRPGEEAYHQIVAAFGPGILRADGEIDRQKLGAIRFSDEQQLKVLNAIVGPAVLKKMLAEKEAHIRSGAKTVVLDIPLLFESGLTHWVDKVLVVYVDDDVQLRRLMARNGFTEEEALKRIRSQWPSAEKVKRADAVIDNNGTIEETRRQLLAILHQWDLLGKGGSGHHHHHH

SEQ ID NO: 489 - DNA, 633 bp, synthetic construct
  misc_feature 1..633: note = Variant of 3'O-kinase
  source 1..633: mol_type = other DNA
atggcgtttaccattggtttaacaggagggatcgcagcgggcaaatcgactgtgagtgccatgatgcgtgaactgggtctgccggtcatcgatgctgacgaggcagcacgcgccgttatgcgtccaggcgaagaagcttatcgtcagattgtagctgcgttcggtccgggcattcttcgtgccgatggcgagatcgatcgccagaaactgggtgctatccgcttttcggacgaacaacaactgaaggtgctgaatgcgattgtaggtcctgcagtcctgaagaagatgctcgctgagaaagaagctcatatccgctcaggcgccaagacggttgtgctggatatcccgctgctgttcgaatccggattgacccattgggtcgacaaagtgctcgtggtgtacgatgatgatgatgttcagttacgccgccttatggcacgtaacgggtttactgaagaagaagctctgaagcgcattcgttcacagtggcccagtgcggagaaagttaaacgtgcagacgctgtcatcgacaataatggcacgattgaagaaacccgccgccagctgctggccattttacaccagtgggatctgctgggtaagggtggctccggccaccatcatcaccatcac

SEQ ID NO: 490 - protein, 211 aa, synthetic construct
  REGION 1..211: note = Variant of 3'O-kinase
MAFTIGLTGGIAAGKSTVSAMMRELGLPVIDADEAARAVMRPGEEAYRQIVAAFGPGILRADGEIDRQKLGAIRFSDEQQLKVLNAIVGPAVLKKMLAEKEAHIRSGAKTVVLDIPLLFESGLTHWVDKVLVVYDDDDVQLRRLMARNGFTEEEALKRIRSQWPSAEKVKRADAVIDNNGTIEETRRQLLAILHQWDLLGKGGSGHHHHHH

SEQ ID NO: 491 - DNA, 633 bp, synthetic construct
  misc_feature 1..633: note = Variant of 3'O-kinase
  source 1..633: mol_type = other DNA
atggcgtttaccattggtttaacaggagggatcgcagcgggcaaatcgactgtgagtgccatgatgcgtgaactgggtctgccggtcatcgatgctgacgaggcagcacgcgccgttatgcgtccaggcgaagaagcttatcatcagattgtagctgcgttcggtccgggcattcttcgtgccgatggcgagatcgatcgccagaaactgggtgctatccgcttttcggacgaacaacaacgcaaggtgctgaatgcgattgtaggtcctgcagtcctgaagaagatgctcgctgagaaagaagctatcatccgctcaggcgccaagacggttgtgctggatatcccgctgctgttcgaatccggattgacccattgggtcgacaaagtgctcgtggtgtacgttgatgatgatgttcagttacgccgccttatggcacgtaacgggtttactgaagaagaagctctgaagcgcattcgttcacagtggcccagtgcggagaaagttaaacgtgcagacgctgtgatcgacaataatggcacgattgaagaaacccgccgccagctgctggccattttacaccagtgggatctgctgaataagggtggctccggccaccatcatcaccatcac

SEQ ID NO: 492 - protein, 211 aa, synthetic construct
  REGION 1..211: note = Variant of 3'O-kinase
MAFTIGLTGGIAAGKSTVSAMMRELGLPVIDADEAARAVMRPGEEAYHQIVAAFGPGILRADGEIDRQKLGAIRFSDEQQRKVLNAIVGPAVLKKMLAEKEAIIRSGAKTVVLDIPLLFESGLTHWVDKVLVVYVDDDVQLRRLMARNGFTEEEALKRIRSQWPSAEKVKRADAVIDNNGTIEETRRQLLAILHQWDLLNKGGSGHHHHHH

SEQ ID NO: 493 - DNA, 633 bp, synthetic construct
  misc_feature 1..633: note = Variant of 3'O-kinase
  source 1..633: mol_type = other DNA
atggcgtttaccattggtttaacaggagggatcgcagcgggcaaatcgactgtgagtgccatgatgcgtgaactgggtctgccggtcatcgatgctgacgaggcagcacgcgccgttatgcgtccaggcgaagaagcttatcgtcagattgtagctgcgttcggtccgggcattcttcgtgccgatggcgagatcgatcgccagaaactgggtgctatccgcttttcggacgaacaacaacgcaaggtgctgaatgcgattgtaggtcctgcagtcctgaagaagatgctcgctgagaaagaagctctgatccgctcaggcgccaagacggttgtgctggatatcccgctgctgttcgaatccggattgacccattgggtcgacaaagtgctcgtggtgtacgtcgatgatgatgttcagttacgccgccttatggcacgtaacgggtttactgaagaagaagctctgaagcgcattcgttcacagtggcccagtgcggagaaagttaaacgtgcagacgctgtgatcgacaataatggcacgattgaagaaacccgccgccagctgctggccattttacaccagtgggatctgctgggtaagggtggctccggccaccatcatcaccatcac

SEQ ID NO: 494 - protein, 211 aa, synthetic construct
  REGION 1..211: note = Variant of 3'O-kinase
MAFTIGLTGGIAAGKSTVSAMMRELGLPVIDADEAARAVMRPGEEAYRQIVAAFGPGILRADGEIDRQKLGAIRFSDEQQRKVLNAIVGPAVLKKMLAEKEALIRSGAKTVVLDIPLLFESGLTHWVDKVLVVYVDDDVQLRRLMARNGFTEEEALKRIRSQWPSAEKVKRADAVIDNNGTIEETRRQLLAILHQWDLLGKGGSGHHHHHH

SEQ ID NO: 495 - DNA, 633 bp, synthetic construct
  misc_feature 1..633: note = Variant of 3'O-kinase
  source 1..633: mol_type = other DNA
atggcgtttaccattggtttaacaggagggatcgcagcgggcaaatcgactgtgagtgccatgatgcgtgaactgggtctgccggtcatcgatgctgacgaggcagcacgcgccgttatgaagccaggcgaagaagcgtatcgccagattgtagctgcgttcggtccgggcattcttcgtgccgatggcgagatcgatcgccagaaactgggtgctatccgcttttcggacgaacaacaacgtaaggtgctgaattcgattgtaggtcctgcagtcctgaagaagatgctcgctgagaaagaagctcatatccgctcaggcgccaagacggttgtgctggatatcccgctgctgttcgaatccggattgacccattgggtcgacaaagtgctcgtggtgtacgtcgatgatgatgttcagttacgccgccttatggcacgtaacgggtttactgaagaagaagctctgaagcgcattcgttcacagtggcccagtgcggagaaagttaaacgtgcagacgctgtcatcgacaataatggcaatattgaagaaacccgccgccagctgctggacattttacaccagtgggatctgctgggtaagggtggctccggccaccatcatcaccatcac

SEQ ID NO: 496 - protein, 211 aa, synthetic construct
  REGION 1..211: note = Variant of 3'O-kinase
MAFTIGLTGGIAAGKSTVSAMMRELGLPVIDADEAARAVMKPGEEAYRQIVAAFGPGILRADGEIDRQKLGAIRFSDEQQRKVLNSIVGPAVLKKMLAEKEAHIRSGAKTVVLDIPLLFESGLTHWVDKVLVVYVDDDVQLRRLMARNGFTEEEALKRIRSQWPSAEKVKRADAVIDNNGNIEETRRQLLDILHQWDLLGKGGSGHHHHHH

SEQ ID NO: 497 - DNA, 633 bp, synthetic construct
  misc_feature 1..633: note = Variant of 3'O-kinase
  source 1..633: mol_type = other DNA
atggcgtttaccattggtttaacaggagggatcgcagcgggcaaatcgactgtgagtgccatgatgcgtgaactgggtctgccggtcatcgatgctgacgaggcagcacgcgccgttatgcgtccaggcgaagaagcttatcgtcagattgtagctgcgttcggtccgggcattcttcgtgccgatggcgagatcgatcgccagaaactgggtgctatccgcttttcggacgaacaacaacgcaaggtgctgaatgcgattgtaggtcctgcagtcctgaagaagatgctcgctgagaaagaagctttcatccgctcaggcgccaagacggttgtgctggatatcccgctgctgttcgaatccggattgacccattgggtcgacaaagtgctcgtggtgtacgttgatgatgatgttcagttacgccgccttatggcacgtaacgggtttactgaagaagaagctctgaagcgcattcgttcacagtggcccagtgcggagaaagttaaacgtgcagacgctgtgatcgacaataatggcacgattgaagaaacccgccgccagctgctggccattttacaccagtgggatctgctgaataagggtggctccggccaccatcatcaccatcac

SEQ ID NO: 498 - protein, 211 aa, synthetic construct
  REGION 1..211: note = Variant of 3'O-kinase
MAFTIGLTGGIAAGKSTVSAMMRELGLPVIDADEAARAVMRPGEEAYRQIVAAFGPGILRADGEIDRQKLGAIRFSDEQQRKVLNAIVGPAVLKKMLAEKEAFIRSGAKTVVLDIPLLFESGLTHWVDKVLVVYVDDDVQLRRLMARNGFTEEEALKRIRSQWPSAEKVKRADAVIDNNGTIEETRRQLLAILHQWDLLNKGGSGHHHHHH

SEQ ID NO: 499 - DNA, 633 bp, synthetic construct
  misc_feature 1..633: note = Variant of 3'O-kinase
  source 1..633: mol_type = other DNA
atggcgtttaccattggtttaacaggagggatcgcagcgggcaaatcgactgtgagtgccatgatgcgtgaactgggtctgccggtcatcgatgctgacgaggcagcacgcgccgttatgcgtccaggcgaagaagcttatcgccagattgtagctgcgttcggtccgggcattcttcgtgccgatggcgagatcgatcgccagaaactgggtgctatccgcttttcggacgaacaacaacgtaaggtgctgaatgcgattgtaggtcctgcagtcctgaagaagatgctcgctgagaaagaagctcatatccgctcaggcgccaagacggttgtgctggatatcccgctgctgttcgaatccggattgacccattgggtcgacaaagtgctcgtggtgtacgtcgatgatgatgttcagttacgccgccttatggcacgtaacgggtttactgaagaagaagctctgaagcgcattcgttcacagtggcccagtgcggagaaagttaaacgtgcagacgctgtcatcgacaataatggcacggaggaagaaacccgccgccagctgctggccattttacaccagtgggatctgctgggtaagggtggctccggccaccatcatcaccatcac

SEQ ID NO: 500 - protein, 211 aa, synthetic construct
  REGION 1..211: note = Variant of 3'O-kinase
MAFTIGLTGGIAAGKSTVSAMMRELGLPVIDADEAARAVMRPGEEAYRQIVAAFGPGILRADGEIDRQKLGAIRFSDEQQRKVLNAIVGPAVLKKMLAEKEAHIRSGAKTVVLDIPLLFESGLTHWVDKVLVVYVDDDVQLRRLMARNGFTEEEALKRIRSQWPSAEKVKRADAVIDNNGTEEETRRQLLAILHQWDLLGKGGSGHHHHHH

SEQ ID NO: 501 - DNA, 633 bp, synthetic construct
  misc_feature 1..633: note = Variant of 3'O-kinase
  source 1..633: mol_type = other DNA
atggcgtttaccattggtttaacaggagggatcgcagcgggcaaatcgactgtgagtgccatgatgcgtgaactgggtctgccggtcatcgatgctgacgaggcagcacgcgccgttatgcgtccaggcgaagaagcttatcgccagattgtagctgcgttcggtccgggcattcttcgtgccgatggcgagatcgatcgccagaaactgggtgctatccgcttttcggacgaacaacaactgaaggtgctgaatgcgattgtaggtcctgcagtcctgaagaagatgctcgctgagaaagaagctatgatccgctcaggcgccaagacggttgtgctggatatcccgctgctgttcgaatccggattgacccattgggtcgacaaagtgctcgtggtgtacgtcgatgatgatgttcagttacgccgccttatggcacgtaacgggtttactgaagaagaagctctgaagcgcattcgttcacagtggcccagtgcggagaaagttaaacgtgcagacgctgtcatcgacaataatggcacgattgaagaaacccgccgccagctgctggccattttacaccagtgggatctgctgggtaagggtggctccggccaccatcatcaccatcac

SEQ ID NO: 502 - protein, 211 aa, synthetic construct
  REGION 1..211: note = Variant of 3'O-kinase
MAFTIGLTGGIAAGKSTVSAMMRELGLPVIDADEAARAVMRPGEEAYRQIVAAFGPGILRADGEIDRQKLGAIRFSDEQQLKVLNAIVGPAVLKKMLAEKEAMIRSGAKTVVLDIPLLFESGLTHWVDKVLVVYVDDDVQLRRLMARNGFTEEEALKRIRSQWPSAEKVKRADAVIDNNGTIEETRRQLLAILHQWDLLGKGGSGHHHHHH

SEQ ID NO: 503 - DNA, 633 bp, synthetic construct
  misc_feature 1..633: note = Variant of 3'O-kinase
  source 1..633: mol_type = other DNA
atggcgtttaccattggtttaacaggagggatcgcagcgggcaaatcgactgtgagtgccatgatgcgtgaactgggtctgccggtcatcgatgctgacgaggcagcacgcgccgttatggtcccaggcgaagaaacgtatcgccagattgtagctgcgttcggtccgggcattcttcgtgccgatggcgagatcgatcgccagaaactgggtgctatccgcttttcggacgaacaacaacgtaaggtgctgaatgcgattgtaggtcctgcagtcctgaagaaaatgctcgctgagaaagaagctcatatccgctcaggcgccaagacggttgtgctggatatcccgctgctgttcgaatccggattgacccattgggtcgacaaagtgctcgtggtgtacgtcgatgatgatgttcagttacgccgccttatggcacgtaacgggtttactgaagaagaagctctgaagcgcattcgttcacagtggcccagtgcggagaaagttaaacgtgcagacgctgtcatcgacaataatggcactattgaagaaacccgccgccagctggtggacattttacaccagtgggatctgctgggtaagggtggctccggccaccatcatcaccatcac

SEQ ID NO: 504 - protein, 211 aa, synthetic construct
  REGION 1..211: note = Variant of 3'O-kinase
MAFTIGLTGGIAAGKSTVSAMMRELGLPVIDADEAARAVMVPGEETYRQIVAAFGPGILRADGEIDRQKLGAIRFSDEQQRKVLNAIVGPAVLKKMLAEKEAHIRSGAKTVVLDIPLLFESGLTHWVDKVLVVYVDDDVQLRRLMARNGFTEEEALKRIRSQWPSAEKVKRADAVIDNNGTIEETRRQLVDILHQWDLLGKGGSGHHHHHH

SEQ ID NO: 505 - DNA, 633 bp, synthetic construct
  misc_feature 1..633: note = Variant of 3'O-kinase
  source 1..633: mol_type = other DNA
atggcgtttaccattggtttaacaggagggatcgcagcgggcaaatcgactgtgagtgccatgatgcgtgaactgggtctgccggtcatcgatgctgacgaggcagcacgcgccgttatgcgtccaggcgaagaagcttatcgtcagattgtagctgcgttcggtccgggcattcttcgtgccgatggcgagatcgatcgccagaaactgggtgctatccgcttttcggacgaacaacaacgcaaggtgctgaatgcgattgtaggtcctgcagtcctgaagaagatgctcgctgagaaagaagctcatatccgctcaggcgccaagacggttgtgctggatatcccgctgctgttcgaatccggattgacccattgggtcgacaaagtgctcgtggtgtacgtcgatgatgatgttcagttacgccgccttatggcacgtaacgggtttactgaagaagaagctctgaagcgcattcgttcacagtggcccagtgcggagaaagttaaacgtgcagacgcttggatcgacaataatggcacgattgaagaaacccgccgccagctgctggccattttacaccagtgggatctgctggataagggtggctccggccaccatcatcaccatcac

SEQ ID NO: 506 - protein, 211 aa, synthetic construct
  REGION 1..211: note = Variant of 3'O-kinase
MAFTIGLTGGIAAGKSTVSAMMRELGLPVIDADEAARAVMRPGEEAYRQIVAAFGPGILRADGEIDRQKLGAIRFSDEQQRKVLNAIVGPAVLKKMLAEKEAHIRSGAKTVVLDIPLLFESGLTHWVDKVLVVYVDDDVQLRRLMARNGFTEEEALKRIRSQWPSAEKVKRADAWIDNNGTIEETRRQLLAILHQWDLLDKGGSGHHHHHH

SEQ ID NO: 507 - DNA, 633 bp, synthetic construct
  misc_feature 1..633: note = Variant of 3'O-kinase
  source 1..633: mol_type = other DNA
atggcgtttaccattggtttaacaggagggatcgcagcgggcaaatcgactgtgagtgccatgatgcgtgaactgggtctgccggtcatcgatgctgacgaggcagcacgcgccgttatgcgtccaggcgaagaagcttatcgccagattgtagctgcgttcggtccgggcattcttcgtgccgatggcgagatcgatcgccagaaactgggtgctatccgcttttcggacgaacaacaactgaaggtgctgaatgcgattgtaggtcctgcagtcctgaagaagatgctcgctgagaaagaagctcacatccgctcaggcgccaagacggttgtgctggatatcccgctgctgttcgaatccggattgacccattgggtcgacaaagtgctcgtggtgtacgttgatgatgatgttcagttacgccgccttatggcacgtaacgggtttactgaagaagaagctctgaagcgcattcgttcacagtggcccagtgcggagaaagttaaacgtgcagacgctgtgatcgacaataatggcacgattgaagaaacccgccgccagctgctggccattttacaccagtgggatctgctgtgtaagggtggctccggccaccatcatcaccatcac

SEQ ID NO: 508 - protein, 211 aa, synthetic construct
  REGION 1..211: note = Variant of 3'O-kinase
MAFTIGLTGGIAAGKSTVSAMMRELGLPVIDADEAARAVMRPGEEAYRQIVAAFGPGILRADGEIDRQKLGAIRFSDEQQLKVLNAIVGPAVLKKMLAEKEAHIRSGAKTVVLDIPLLFESGLTHWVDKVLVVYVDDDVQLRRLMARNGFTEEEALKRIRSQWPSAEKVKRADAVIDNNGTIEETRRQLLAILHQWDLLCKGGSGHHHHHH

SEQ ID NO: 509 - DNA, 633 bp, synthetic construct
  misc_feature 1..633: note = Variant of 3'O-kinase
  source 1..633: mol_type = other DNA
atggcgtttaccattggtttaacaggagggatcgcagcgggcaaatcgactgtgagtgccatgatgcgtgaactgggtctgccggtcatcgatgctgacgaggcagcacgcgccgttatgcgtccaggcgaagaagcttatcgtcagattgtagctgcgttcggtccgggcattcttcgtgccgatggcgagatcgatcgccagaaactgggtgctatccgcttttcggacgaacaacaacgcaaggtgctgaatgcgattgtaggtcctgcagtcctgaagaagatgctcgctgagaaagaagctcacatccgctcaggcgccaagacggttgtgctggatatcccgctgctgttcgaatccggattgacccattgggtcgacaaagtgctcgtggtgtacgttgatgatgatgttcagttacgccgccttatggcacgtaacgggtttactgaagaagaagctctgaagcgcattcgttcacagtggcccagtgcggagaaagttaaacgtgcagacgctgtgatcgacaataatggcacgattgaagaaacccgccgccagctgctggccattttacaccagtgggatctgctggataagggtggctccggccaccatcatcaccatcac

SEQ ID NO: 510 - protein, 211 aa, synthetic construct
  REGION 1..211: note = Variant of 3'O-kinase
MAFTIGLTGGIAAGKSTVSAMMRELGLPVIDADEAARAVMRPGEEAYRQIVAAFGPGILRADGEIDRQKLGAIRFSDEQQRKVLNAIVGPAVLKKMLAEKEAHIRSGAKTVVLDIPLLFESGLTHWVDKVLVVYVDDDVQLRRLMARNGFTEEEALKRIRSQWPSAEKVKRADAVIDNNGTIEETRRQLLAILHQWDLLDKGGSGHHHHHH

SEQ ID NO: 511 - DNA, 633 bp, synthetic construct
  misc_feature 1..633: note = Variant of 3'O-kinase
  source 1..633: mol_type = other DNA
atggcgtttaccattggtttaacaggagggatcgcagcgggcaaatcgactgtgagtgccatgatgcgtgaactgggtctgccggtcatcgatgctgacgaggcagcacgcgccgttatgcgtccaggcgaagaagcttatcgccagattgtagctgcgttcggtccgggcattcttcgtgccgatggcgagatcgatcgccagaaactgggtgctatccgcttttcggacgaacaacaactgaaggtgctgaatgcgattgtaggtcctgcagtcctgaagaagatgctcgctgagaaagaagctctgatccgctcaggcgccaagacggttgtgctggatatcccgctgctgttcgaatccggattgacccattgggtcgacaaagtgctcgtggtgtacgtcgatgatgatgttcagttacgccgccttatggcacgtaacgggtttactgaagaagaagctctgaagcgcattcgttcacagtggcccagtgcggagaaagttaaacgtgcagacgctgtcatcgacaataatggcacgattgaagaaacccgccgccagctgctggccattttacaccagtgggatctgctgggtaagggtggctccggccaccatcatcaccatcac

SEQ ID NO: 512 - protein, 211 aa, synthetic construct
  REGION 1..211: note = Variant of 3'O-kinase
MAFTIGLTGGIAAGKSTVSAMMRELGLPVIDADEAARAVMRPGEEAYRQIVAAFGPGILRADGEIDRQKLGAIRFSDEQQLKVLNAIVGPAVLKKMLAEKEALIRSGAKTVVLDIPLLFESGLTHWVDKVLVVYVDDDVQLRRLMARNGFTEEEALKRIRSQWPSAEKVKRADAVIDNNGTIEETRRQLLAILHQWDLLGKGGSGHHHHHH

SEQ ID NO: 513 - DNA, 633 bp, synthetic construct
  misc_feature 1..633: note = Variant of 3'O-kinase
  source 1..633: mol_type = other DNA
atggcgtttaccattggtttaacaggagggatcgcagcgggcaaatcgactgtgagtgccatgatgcgtgaactgggtctgccggtcatcgatgctgacgaggcagcacgcgccgttatgcgtccaggcgaagaagcttatcatcagattgtagctgcgttcggtccgggcattcttcgtgccgatggcgagatcgatcgccagaaactgggtgctatccgcttttcggacgaacaacaacgcaaggtgctgaatgcgattgtaggtcctgcagtcctgaagaagatgctcgctgagaaagaagctgtcatccgctcaggcgccaagacggttgtgctggatatcccgctgctgttcgaatccggattgacccattgggtcgacaaagtgctcgtggtgtacgtcgatgatgatgttcagttacgccgccttatggcacgtaacgggtttactgaagaagaagctctgaagcgcattcgttcacagtggcccagtgcggagaaagttaaacgtgcagacgcttggatcgacaataatggcacgattgaagaaacccgccgccagctgctggccattttacaccagtgggatctgctgtgtaagggtggctccggccaccatcatcaccatcac

SEQ ID NO: 514 - protein, 211 aa, synthetic construct
  REGION 1..211: note = Variant of 3'O-kinase
MAFTIGLTGGIAAGKSTVSAMMRELGLPVIDADEAARAVMRPGEEAYHQIVAAFGPGILRADGEIDRQKLGAIRFSDEQQRKVLNAIVGPAVLKKMLAEKEAVIRSGAKTVVLDIPLLFESGLTHWVDKVLVVYVDDDVQLRRLMARNGFTEEEALKRIRSQWPSAEKVKRADAWIDNNGTIEETRRQLLAILHQWDLLCKGGSGHHHHHH

SEQ ID NO: 515 - DNA, 633 bp, synthetic construct
  misc_feature 1..633: note = Variant of 3'O-kinase
  source 1..633: mol_type = other DNA
atggcgtttaccattggtttaacaggagggatcgcagcgggcaaatcgactgtgagtgccatgatgcgtgaactgggtctgccggtcatcgatgctgacgaggcagcacgcgccgttatgcgtccaggcgaagaagcttatcgccagattgtagctgcgttcggtccgggcattcttcgtgccgatggcgagatcgatcgccagaaactgggtgcgatccgcttttcggacgaacaacaacgtctggtgctgaatgcgattatgggtcctgaagtcctgaagaagatgctcgctgagaaagaagctcatatccgctcaggcgccaagacggttgtgctggatatcccgctgctgttcgaatccggattgcagcattgggtcgacaaagtgctcgtggtgtacgtcgatgatgatgttcagttacgccgccttatggcacgtaacgggtttactgaagaagaagctctgaagcgcattcgttcacagtggcccagtgaagagaaagttaaacgtgcagacgctgtcatcgacaataatggcacggaggaagaaacccgccgccagctgctggccattttacaccagtgggatctgctgggtaagggtggctccggccaccatcatcaccatcac

SEQ ID NO: 516 - protein, 211 aa, synthetic construct
  REGION 1..211: note = Variant of 3'O-kinase
MAFTIGLTGGIAAGKSTVSAMMRELGLPVIDADEAARAVMRPGEEAYRQIVAAFGPGILRADGEIDRQKLGAIRFSDEQQRLVLNAIMGPEVLKKMLAEKEAHIRSGAKTVVLDIPLLFESGLQHWVDKVLVVYVDDDVQLRRLMARNGFTEEEALKRIRSQWPSEEKVKRADAVIDNNGTEEETRRQLLAILHQWDLLGKGGSGHHHHHH

SEQ ID NO: 517 - DNA, 633 bp, synthetic construct
  misc_feature 1..633: note = Variant of 3'O-kinase
  source 1..633: mol_type = other DNA
atggcgtttaccattggtttaacaggagggatcgcagcgggcaaatcgactgtgagtgccatgatgcgtgaactgggtctgccggtcatcgatgctgacgaggcagcacgcgccgttatgcgtccaggcgaagaagcttatcgccagattgtagctgcgttcggtccgggcattcttcgtgccgatggcgagatcgatcgccagaaactgggtgcgatccgcttttcggacgaacaacaacgtatggtgctgaatgcgattgtaggtcctgcagtcctgaagaagatgctcgctgagaaagaagctcatatccgctcaggcgccaagacggttgtgctggatatcccgctgctgttcgaatccggattgcagcattgggtcgacaaagtgctcgtggtgtacgtcgatgatgatgttcagttacgccgccttatggcacgtaacgggtttactgaagaagaagctctgaagcgcattcgttcacagtggcccagtgaagagaaagttaaacgtgcagacgctgtcatcgacaataatggcacgattgaagaaacccgccgccagctgctggccattttacaccagtgggatctgctgggtaagggtggctccggccaccatcatcaccatcac

SEQ ID NO: 518 - protein, 211 aa, synthetic construct
  REGION 1..211: note = Variant of 3'O-kinase
MAFTIGLTGGIAAGKSTVSAMMRELGLPVIDADEAARAVMRPGEEAYRQIVAAFGPGILRADGEIDRQKLGAIRFSDEQQRMVLNAIVGPAVLKKMLAEKEAHIRSGAKTVVLDIPLLFESGLQHWVDKVLVVYVDDDVQLRRLMARNGFTEEEALKRIRSQWPSEEKVKRADAVIDNNGTIEETRRQLLAILHQWDLLGKGGSGHHHHHH

SEQ ID NO: 519 - DNA, 633 bp, synthetic construct
  misc_feature 1..633: note = Variant of 3'O-kinase
  source 1..633: mol_type = other DNA
atggcgtttaccattggtttaacaggagggatcgcagcgggcaaatcgactgtgagtgccatgatgcgtgaactgggtctgccggtcatcgatgctgacgaggcagcacgcgccgttatgcgtccaggcgaagaagcttatcgccagattgtagctgcgttcggtccgggcattcttcgtgccgatggcgagatcgatcgccagaaactgggtgcgatccgcttttcggacgaacaacaacgtaaggtgctgaatgcgattgtaggtcctgcagtcctgaagaagatgctcgctgagaaagaagctcatatccgctcaggcgccaagacggttgtgctggatatcccgctgctgttcgaatccggattgcagcattgggtcgacaaagtgctcgtggtgtacgtcgatgatgatgttcagttacgccgccttatggcacgtaacgggtttactgaagaagaagctctgaagcgcattcgttcacagtggcccagtgaagagaaagttaaacgtgcagacgctgtcatcgacaataatggcacggaggaagaaacccgccgccagctgctggccattttacaccagtgggatctgctgggtaagggtggctccggccaccatcatcaccatcac

SEQ ID NO: 520 - protein, 211 aa, synthetic construct
  REGION 1..211: note = Variant of 3'O-kinase
MAFTIGLTGGIAAGKSTVSAMMRELGLPVIDADEAARAVMRPGEEAYRQIVAAFGPGILRADGEIDRQKLGAIRFSDEQQRKVLNAIVGPAVLKKMLAEKEAHIRSGAKTVVLDIPLLFESGLQHWVDKVLVVYVDDDVQLRRLMARNGFTEEEALKRIRSQWPSEEKVKRADAVIDNNGTEEETRRQLLAILHQWDLLGKGGSGHHHHHH

SEQ ID NO: 521 - DNA, 633 bp, synthetic construct
  misc_feature 1..633: note = Variant of 3'O-kinase
  source 1..633: mol_type = other DNA
atggcgtttaccattggtttaacaggagggatcgcagcgggcaaatcgactgtgagtgccatgatgcgtgaactgggtctgccggtcatcgatgctgacgaggcagcacgcgccgttatgcgtccaggcgaagaagcttatcatcagattgtagctgcgttcggtccgggcattcttcgtgccgatggcgagatcgatcgccagaaactgggtgctatccgcttttcggacgaacaacaacgtaaggtgctgaatgcgattgtaggtcctgcagtcctgaagaagatgctcgctgagaaagaagctcacatccgctcaggcgccaagacggttgtgctggatatcccgctgctgttcgaatccggattgacccattgggtcgacaaagtgctcgtggtgtacgtcgatgatgatgttcagttacgccgccttatggcacgtaacgggtttactgaagaagaagctctgaagcgcattcgttcacagtggcccagtgcggagaaagttaaacgtgcagacgctgtgatcgacaataatggcacgattgaagaaacccgccgccagctgctggccattttacaccagtgggatctgctgggtaagggtggctccggccaccatcatcaccatcac

SEQ ID NO: 522 - protein, 211 aa, synthetic construct
  REGION 1..211: note = Variant of 3'O-kinase
MAFTIGLTGGIAAGKSTVSAMMRELGLPVIDADEAARAVMRPGEEAYHQIVAAFGPGILRADGEIDRQKLGAIRFSDEQQRKVLNAIVGPAVLKKMLAEKEAHIRSGAKTVVLDIPLLFESGLTHWVDKVLVVYVDDDVQLRRLMARNGFTEEEALKRIRSQWPSAEKVKRADAVIDNNGTIEETRRQLLAILHQWDLLGKGGSGHHHHHH

SEQ ID NO: 523 - DNA, 633 bp, synthetic construct
  misc_feature 1..633: note = Variant of 3'O-kinase
  source 1..633: mol_type = other DNA
atggcgtttaccattggtttaacaggagggatcgcagcgggcaaatcgactgtgagtgccatgatgcgtgaactgggtctgccggtcatcgatgctgacgaggcagcacgcgccgttatgcgtccaggcgaagaagcttatcgccagattgtagctgcgttcggtccgggcattcttcgtgccgatggcgagatcgatcgccagaaactgggtgcgatccgcttttcggacgaacaacaacgtaaggtgctgaatgcgattgtaggtcctgcagtcctgaagaagatgctcgctgagaaagaagctcatatccgctcaggcgccaagacggttgtgctggatatcccgctgctgttcgaatccggattgacccattgggtcgacaaagtgctcgtggtgtacgtcgatgatgatgttcagttacgccgccttatggcacgtaacgggtttactgaagaagaagctctgaagcgcattcgttcacagtggcccagtgaagagaaagttaaacgtgcagacgctgtcatcgacaataatggcacggaggaagaaacccgccgccagctgctggccattttacaccagtgggatctgctgggtaagggtggctccggccaccatcatcaccatcac

SEQ ID NO: 524 - protein, 211 aa, synthetic construct
  REGION 1..211: note = Variant of 3'O-kinase
MAFTIGLTGGIAAGKSTVSAMMRELGLPVIDADEAARAVMRPGEEAYRQIVAAFGPGILRADGEIDRQKLGAIRFSDEQQRKVLNAIVGPAVLKKMLAEKEAHIRSGAKTVVLDIPLLFESGLTHWVDKVLVVYVDDDVQLRRLMARNGFTEEEALKRIRSQWPSEEKVKRADAVIDNNGTEEETRRQLLAILHQWDLLGKGGSGHHHHHH

SEQ ID NO: 525 - DNA, 633 bp, synthetic construct
  misc_feature 1..633: note = Variant of 3'O-kinase
  source 1..633: mol_type = other DNA
atggcgtttaccattggtttaacaggagggatcgcagcgggcaaatcgactgtgagtgccatgatgcgtgaactgggtctgccggtcatcgatgctgacgaggcagcacgcgccgttatgcgtccaggcgaagaagcttatcatcagattgtagctgcgttcggtccgggcattcttcgtgccgatggcgagatcgatcgccagaaactgggtgctatccgcttttcggacgaacaacaacgcaaggtgctgaatgcgattgtaggtcctgcagtcctgaagaagatgctcgctgagaaagaagctctgatccgctcaggcgccaagacggttgtgctggatatcccgctgctgttcgaatccggattgacccattgggtcgacaaagtgctcgtggtgtacgttgatgatgatgttcagttacgccgccttatggcacgtaacgggtttactgaagaagaagctctgaagcgcattcgttcacagtggcccagtgcggagaaagttaaacgtgcagacgctgtcatcgacaataatggcacgattgaagaaacccgccgccagctgctggccattttacaccagtgggatctgctgtgtaagggtggctccggccaccatcatcaccatcac

SEQ ID NO: 526 - protein, 211 aa, synthetic construct
  REGION 1..211: note = Variant of 3'O-kinase
MAFTIGLTGGIAAGKSTVSAMMRELGLPVIDADEAARAVMRPGEEAYHQIVAAFGPGILRADGEIDRQKLGAIRFSDEQQRKVLNAIVGPAVLKKMLAEKEALIRSGAKTVVLDIPLLFESGLTHWVDKVLVVYVDDDVQLRRLMARNGFTEEEALKRIRSQWPSAEKVKRADAVIDNNGTIEETRRQLLAILHQWDLLCKGGSGHHHHHH

SEQ ID NO: 527 - DNA, 633 bp, synthetic construct
  misc_feature 1..633: note = Variant of 3'O-kinase
  source 1..633: mol_type = other DNA
atggcgtttaccattggtttaacaggagggatcgcagcgggcaaatcgactgtgagtgccatgatgcgtgaactgggtctgccggtcatcgatgctgacgaggcagcacgcgccgttatgcgtccaggcgaagaagcttatcgccagattgtagctgcgttcggtccgggcattcttcgtgccgatggcgagatcgatcgccagaaactgggtgctatccgcttttcggacgaacaacaactgaaggtgctgaatgcgattgtaggtcctgcagtcctgaagaagatgctcgctgagaaagaagctatcatccgctcaggcgccaagacggttgtgctggatatcccgctgctgttcgaatccggattgacccattgggtcgacaaagtgctcgtggtgtacgtcgatgatgatgttcagttacgccgccttatggcacgtaacgggtttactgaagaagaagctctgaagcgcattcgttcacagtggcccagtgcggagaaagttaaacgtgcagacgctgtcatcgacaataatggcacgattgaagaaacccgccgccagctgctggccattttacaccagtgggatctgctgggtaagggtggctccggccaccatcatcaccatcac

SEQ ID NO: 528 - protein, 211 aa, synthetic construct
  REGION 1..211: note = Variant of 3'O-kinase
MAFTIGLTGGIAAGKSTVSAMMRELGLPVIDADEAARAVMRPGEEAYRQIVAAFGPGILRADGEIDRQKLGAIRFSDEQQLKVLNAIVGPAVLKKMLAEKEAIIRSGAKTVVLDIPLLFESGLTHWVDKVLVVYVDDDVQLRRLMARNGFTEEEALKRIRSQWPSAEKVKRADAVIDNNGTIEETRRQLLAILHQWDLLGKGGSGHHHHHH

SEQ ID NO: 529 - DNA, 633 bp, synthetic construct
  misc_feature 1..633: note = Variant of 3'O-kinase
  source 1..633: mol_type = other DNA
atggcgtttaccattggtttaacaggagggatcgcagcgggcaaatcgactgtgagtgccatgatgcgtgaactgggtctgccggtcatcgatgctgacgaggcagcacgcgccgttatgcgtccaggcgaagaagcttatcgtcagattgtagctgcgttcggtccgggcattcttcgtgccgatggcgagatcgatcgccagaaactgggtgctatccgcttttcggacgaacaacaacgtaaggtgctgaatgcgattgtaggtcctgcagtcctgaagaagatgctcgctgagaaagaagctcatatccgctcaggcgccaagacggttgtgctggatatcccgctgctgttcgaatccggattgacccattgggtcgacaaagtgctcgtggtgtacgatgatgatgatgttcagttacgccgccttatggcacgtaacgggtttactgaagaagaagctctgaagcgcattcgttcacagtggcccagtgcggagaaagttaaacgtgcagacgcttggatcgacaataatggcacgattgaagaaacccgccgccagctgctggccattttacaccagtgggatctgctgaataagggtggctccggccaccatcatcaccatcac

SEQ ID NO: 530 - protein, 211 aa, synthetic construct
  REGION 1..211: note = Variant of 3'O-kinase
MAFTIGLTGGIAAGKSTVSAMMRELGLPVIDADEAARAVMRPGEEAYRQIVAAFGPGILRADGEIDRQKLGAIRFSDEQQRKVLNAIVGPAVLKKMLAEKEAHIRSGAKTVVLDIPLLFESGLTHWVDKVLVVYDDDDVQLRRLMARNGFTEEEALKRIRSQWPSAEKVKRADAWIDNNGTIEETRRQLLAILHQWDLLNKGGSGHHHHHH

SEQ ID NO: 531 - DNA, 633 bp, synthetic construct
  misc_feature 1..633: note = Variant of 3'O-kinase
  source 1..633: mol_type = other DNA
atggcgtttaccattggtttaacaggagggatcgcagcgggcaaatcgactgtgagtgccatgatgcgtgaactgggtctgccggtcatcgatgctgacgaggcagcacgcgccgttatgcgtccaggcgaagaagcttatcgtcagattgtagctgcgttcggtccgggcattcttcgtgccgatggcgagatcgatcgccagaaactgggtgctatccgcttttcggacgaacaacaactgaaggtgctgaatgcgattgtaggtcctgcagtcctgaagaagatgctcgctgagaaagaagctcatatccgctcaggcgccaagacggttgtgctggatatcccgctgctgttcgaatccggattgacccattgggtcgacaaagtgctcgtggtgtacgtcgatgatgatgttcagttacgccgccttatggcacgtaacgggtttactgaagaagaagctctgaagcgcattcgttcacagtggcccagtgcggagaaagttaaacgtgcagacgctgtgatcgacaataatggcacgattgaagaaacccgccgccagctgctggccattttacaccagtgggatctgctggataagggtggctccggccaccatcatcaccatcac

SEQ ID NO: 532 - protein, 211 aa, synthetic construct
  REGION 1..211: note = Variant of 3'O-kinase
MAFTIGLTGGIAAGKSTVSAMMRELGLPVIDADEAARAVMRPGEEAYRQIVAAFGPGILRADGEIDRQKLGAIRFSDEQQLKVLNAIVGPAVLKKMLAEKEAHIRSGAKTVVLDIPLLFESGLTHWVDKVLVVYVDDDVQLRRLMARNGFTEEEALKRIRSQWPSAEKVKRADAVIDNNGTIEETRRQLLAILHQWDLLDKGGSGHHHHHH

SEQ ID NO: 533 - DNA, 633 bp, synthetic construct
  misc_feature 1..633: note = Variant of 3'O-kinase
  source 1..633: mol_type = other DNA
atggcgtttaccattggtttaacaggagggatcgcagcgggcaaatcgactgtgagtgccatgatgcgtgaactgggtctgccggtcatcgatgctgacgaggcagcacgcgccgttatgcgtccaggcgaagaagcttatcgccagattgtagctgcgttcggtccgggcattcttcgtgccgatggcgagatcgatcgccagaaactgggtgcgatccgcttttcggacgaacaacaacgtctggtgctgaatgcgattgtaggtcctgcagtcctgaagaagatgctcgctgagaaagaagctcatatccgctcaggcgccaagacggttgtgctggatatcccgctgctgttcgaatccggattgacccattgggtcgacaaagtgctcgtggtgtacgtcgatgatgatgttcagttacgccgccttatggcacgtaacgggtttactgaagaagaagctctgaagcgcattcgttcacagtggcccagtgaagagaaagttaaacgtgcagacgctgtcatcgacaataatggcacggaggaagaaacccgccgccagctgctggccattttacaccagtgggatctgctgggtaagggtggctccggccaccatcatcaccatcac

SEQ ID NO: 534 - protein, 211 aa, synthetic construct
  REGION 1..211: note = Variant of 3'O-kinase
MAFTIGLTGGIAAGKSTVSAMMRELGLPVIDADEAARAVMRPGEEAYRQIVAAFGPGILRADGEIDRQKLGAIRFSDEQQRLVLNAIVGPAVLKKMLAEKEAHIRSGAKTVVLDIPLLFESGLTHWVDKVLVVYVDDDVQLRRLMARNGFTEEEALKRIRSQWPSEEKVKRADAVIDNNGTEEETRRQLLAILHQWDLLGKGGSGHHHHHH

SEQ ID NO: 535 - DNA, 633 bp, synthetic construct
  misc_feature 1..633: note = Variant of 3'O-kinase
  source 1..633: mol_type = other DNA
atggcgtttaccattggtttaacaggagggatcgcagcgggcaaatcgactgtgagtgccatgatgcgtgaactgggtctgccggtcatcgatgctgacgaggcagcacgcgccgttatgcgtccaggcgaagaagcttatcatcagattgtagctgcgttcggtccgggcattcttcgtgccgatggcgagatcgatcgccagaaactgggtgctatccgcttttcggacgaacaacaactgaaggtgctgaatgcgattgtaggtcctgcagtcctgaagaagatgctcgctgagaaagaagctctgatccgctcaggcgccaagacggttgtgctggatatcccgctgctgttcgaatccggattgacccattgggtcgacaaagtgctcgtggtgtacgttgatgatgatgttcagttacgccgccttatggcacgtaacgggtttactgaagaagaagctctgaagcgcattcgttcacagtggcccagtgcggagaaagttaaacgtgcagacgctgtgatcgacaataatggcacgattgaagaaacccgccgccagctgctggccattttacaccagtgggatctgctgggtaagggtggctccggccaccatcatcaccatcac

SEQ ID NO: 536 - protein, 211 aa, synthetic construct
  REGION 1..211: note = Variant of 3'O-kinase
MAFTIGLTGGIAAGKSTVSAMMRELGLPVIDADEAARAVMRPGEEAYHQIVAAFGPGILRADGEIDRQKLGAIRFSDEQQLKVLNAIVGPAVLKKMLAEKEALIRSGAKTVVLDIPLLFESGLTHWVDKVLVVYVDDDVQLRRLMARNGFTEEEALKRIRSQWPSAEKVKRADAVIDNNGTIEETRRQLLAILHQWDLLGKGGSGHHHHHH

SEQ ID NO: 537 - DNA, 633 bp, synthetic construct
  misc_feature 1..633: note = Variant of 3'O-kinase
  source 1..633: mol_type = other DNA
atggcgtttaccattggtttaacaggagggatcgcagcgggcaaatcgactgtgagtgccatgatgcgtgaactgggtctgccggtcatcgatgctgacgaggcagcacgcgccgttatgcgtccaggcgaagaagcttatcgtcagattgtagctgcgttcggtccgggcattcttcgtgccgatggcgagatcgatcgccagaaactgggtgctatccgcttttcggacgaacaacaacgcaaggtgctgaatgcgattgtaggtcctgcagtcctgaagaagatgctcgctgagaaagaagctcatatccgctcaggcgccaagacggttgtgctggatatcccgctgctgttcgaatccggattgacccattgggtcgacaaagtgctcgtggtgtacgtcgatgatgatgttcagttacgccgccttatggcacgtaacgggtttactgaagaagaagctctgaagcgcattcgttcacagtggcccagtgcggagaaagttaaacgtgcagacgctgtgatcgacaataatggcacgattgaagaaacccgccgccagctgctggccattttacaccagtgggatctgctgtgtaagggtggctccggccaccatcatcaccatcac

SEQ ID NO: 538 - protein, 211 aa, synthetic construct
  REGION 1..211: note = Variant of 3'O-kinase
MAFTIGLTGGIAAGKSTVSAMMRELGLPVIDADEAARAVMRPGEEAYRQIVAAFGPGILRADGEIDRQKLGAIRFSDEQQRKVLNAIVGPAVLKKMLAEKEAHIRSGAKTVVLDIPLLFESGLTHWVDKVLVVYVDDDVQLRRLMARNGFTEEEALKRIRSQWPSAEKVKRADAVIDNNGTIEETRRQLLAILHQWDLLCKGGSGHHHHHH

SEQ ID NO: 539 - DNA, 633 bp, synthetic construct
  misc_feature 1..633: note = Variant of 3'O-kinase
  source 1..633: mol_type = other DNA
atggcgtttaccattggtttaacaggagggatcgcagcgggcaaatcgactgtgagtgccatgatgcgtgaactgggtctgccggtcatcgatgctgacgaggcagcacgcgccgttatgcgtccaggcgaagaagcttatcgccagattgtagctgcgttcggtccgggcattcttcgtgccgatggcgagatcgatcgccagaaactgggtgctatccgcttttcggacgaacaacaacgcaaggtgctgaatgcgattgtaggtcctgcagtcctgaagaagatgctcgctgagaaagaagctatcatccgctcaggcgccaagacggttgtgctggatatcccgctgctgttcgaatccggattgacccattgggtcgacaaagtgctcgtggtgtacgttgatgatgatgttcagttacgccgccttatggcacgtaacgggtttactgaagaagaagctctgaagcgcattcgttcacagtggcccagtgcggagaaagttaaacgtgcagacgcttggatcgacaataatggcacgattgaagaaacccgccgccagctgctggccattttacaccagtgggatctgctgggtaagggtggctccggccaccatcatcaccatcac

SEQ ID NO: 540 - protein, 211 aa, synthetic construct
  REGION 1..211: note = Variant of 3'O-kinase
MAFTIGLTGGIAAGKSTVSAMMRELGLPVIDADEAARAVMRPGEEAYRQIVAAFGPGILRADGEIDRQKLGAIRFSDEQQRKVLNAIVGPAVLKKMLAEKEAIIRSGAKTVVLDIPLLFESGLTHWVDKVLVVYVDDDVQLRRLMARNGFTEEEALKRIRSQWPSAEKVKRADAWIDNNGTIEETRRQLLAILHQWDLLGKGGSGHHHHHH

SEQ ID NO: 541 - DNA, 633 bp, synthetic construct
  misc_feature 1..633: note = Variant of 3'O-kinase
  source 1..633: mol_type = other DNA
atggcgtttaccattggtttaacaggagggatcgcagcgggcaaatcgactgtgagtgccatgatgcgtgaactgggtctgccggtcatcgatgctgacgaggcagcacgcgccgttatgcgtccaggcgaagaagcttatcgccagattgtagctgcgttcggtccgggcattcttcgtgccgatggcgagatcgatcgccagaaactgggtgcgatccgcttttcggacgaacaacaacgtaaggtgctgaatgcgattgtaggtcctgcagtcctgaagaagatgctcgctgagaaagaagctcatatccgctcaggcgccaagacggttgtgctggatatcccgctgctgttcgaatccggattgcagcattgggtcgacaaagtgctcgtggtgtacgtcgatgatgatgttcagttacgccgccttatggcacgtaacgggtttactgaagaagaagctctgaagcgcattcgttcacagtggcccagtatcgagaaagttaaacgtgcagacgctgtcatcgacaataatggcacgatcgaagaaacccgccgccagctgctggccattttacaccagtgggatctgctgggtaagggtggctccggccaccatcatcaccatcac

SEQ ID NO: 542 - protein, 211 aa, synthetic construct
  REGION 1..211: note = Variant of 3'O-kinase
MAFTIGLTGGIAAGKSTVSAMMRELGLPVIDADEAARAVMRPGEEAYRQIVAAFGPGILRADGEIDRQKLGAIRFSDEQQRKVLNAIVGPAVLKKMLAEKEAHIRSGAKTVVLDIPLLFESGLQHWVDKVLVVYVDDDVQLRRLMARNGFTEEEALKRIRSQWPSIEKVKRADAVIDNNGTIEETRRQLLAILHQWDLLGKGGSGHHHHHH

SEQ ID NO: 543 - DNA, 633 bp, synthetic construct
  misc_feature 1..633: note = Variant of 3'O-kinase
  source 1..633: mol_type = other DNA
atggcgtttaccattggtttaacaggagggatcgcagcgggcaaatcgactgtgagtgccatgatgcgtgaactgggtctgccggtcatcgatgctgacgaggcagcacgcgccgttatgcgtccaggcgaagaagcttatcgccagattgtagctgcgttcggtccgggcattcttcgtgccgatggcgagatcgatcgccagaaactgggtgctatccgcttttcggacgaacaacaacgtaaggtgctgaatgcgattgtaggtcctgcagtcctgaagaagatgctcgctgagaaagaagctcatatccgctcaggcgccaagacggttgtgctggatatcccgctgctgttcgaatccggattgacccattgggtcgacaaagtgctcgtggtgtacgttgatgatgatgttcagttacgccgccttatggcacgtaacgggtttactgaagaagaagctctgaagcgcattcgttcacagtggcccagtgcggagaaagttaaacgtgcagacgctgtgatcgacaataatggcacgattgaagaaacccgccgccagctgctggccattttacaccagtgggatctgctgaataagggtggctccggccaccatcatcaccatcac

SEQ ID NO: 544 - protein, 211 aa, synthetic construct
  REGION 1..211: note = Variant of 3'O-kinase
MAFTIGLTGGIAAGKSTVSAMMRELGLPVIDADEAARAVMRPGEEAYRQIVAAFGPGILRADGEIDRQKLGAIRFSDEQQRKVLNAIVGPAVLKKMLAEKEAHIRSGAKTVVLDIPLLFESGLTHWVDKVLVVYVDDDVQLRRLMARNGFTEEEALKRIRSQWPSAEKVKRADAVIDNNGTIEETRRQLLAILHQWDLLNKGGSGHHHHHH

SEQ ID NO: 545 - DNA, 633 bp, synthetic construct
  misc_feature 1..633: note = Variant of 3'O-kinase
  source 1..633: mol_type = other DNA
atggcgtttaccattggtttaacaggagggatcgcagcgggcaaatcgactgtgagtgccatgatgcgtgaactgggtctgccggtcatcgatgctgacgaggcagcacgcgccgttatgcgtccaggcgaagaagcttatcgccagattgtagctgcgttcggtccgggcattcttcgtgccgatggcgagatcgatcgccagaaactgggtcatatccgcttttcggacgaacaacaacgtaaggtgctgaatgcgattgtaggtcctgcagtcctgaagaagatgctcgctgagaaagaagctcatatccgctcaggcgccaagacggttgtgctggatatcccgctgctgttcgaatccggattgacccattgggtcgacaaagtgctcgtggtgtacgtcgatgatgatgttcagttacgccgccttatggcacgtaacgggtttactgaagaagaagctctgaagcgcattcgttcacagtggcccagtatcgagaaagttaaacgtgcagacgctgtcatcgacaataatggcacggaggaagaaacccgccgccagctgctggccattttacaccagtgggatctgctgggtaagggtggctccggccaccatcatcaccatcac

SEQ ID NO: 546 - protein, 211 aa, synthetic construct
  REGION 1..211: note = Variant of 3'O-kinase
MAFTIGLTGGIAAGKSTVSAMMRELGLPVIDADEAARAVMRPGEEAYRQIVAAFGPGILRADGEIDRQKLGHIRFSDEQQRKVLNAIVGPAVLKKMLAEKEAHIRSGAKTVVLDIPLLFESGLTHWVDKVLVVYVDDDVQLRRLMARNGFTEEEALKRIRSQWPSIEKVKRADAVIDNNGTEEETRRQLLAILHQWDLLGKGGSGHHHHHH

SEQ ID NO: 547 - DNA, 633 bp, synthetic construct
  misc_feature 1..633: note = Variant of 3'O-kinase
  source 1..633: mol_type = other DNA
atggcgtttaccattggtttaacaggagggatcgcagcgggcaaatcgactgtgagtgccatgatgcgtgaactgggtctgccggtcatcgatgctgacgaggcagcacgcgccgttatgcgtccaggcgaagaagcttatcgtcagattgtagctgcgttcggtccgggcattcttcgtgccgatggcgagatcgatcgccagaaactgggtgctatccgcttttcggacgaacaacaacgcaaggtgctgaatgcgattgtaggtcctgcagtcctgaagaagatgctcgctgagaaagaagctatcatccgctcaggcgccaagacggttgtgctggatatcccgctgctgttcgaatccggattgacccattgggtcgacaaagtgctcgtggtgtacgtcgatgatgatgttcagttacgccgccttatggcacgtaacgggtttactgaagaagaagctctgaagcgcattcgttcacagtggcccagtgcggagaaagttaaacgtgcagacgctgtgatcgacaataatggcacgattgaagaaacccgccgccagctgctggccattttacaccagtgggatctgctgggtaagggtggctccggccaccatcatcaccatcac

SEQ ID NO: 548 - protein, 211 aa, synthetic construct
  REGION 1..211: note = Variant of 3'O-kinase
MAFTIGLTGGIAAGKSTVSAMMRELGLPVIDADEAARAVMRPGEEAYRQIVAAFGPGILRADGEIDRQKLGAIRFSDEQQRKVLNAIVGPAVLKKMLAEKEAIIRSGAKTVVLDIPLLFESGLTHWVDKVLVVYVDDDVQLRRLMARNGFTEEEALKRIRSQWPSAEKVKRADAVIDNNGTIEETRRQLLAILHQWDLLGKGGSGHHHHHH

SEQ ID NO: 549 - DNA, 633 bp, synthetic construct
  misc_feature 1..633: note = Variant of 3'O-kinase
  source 1..633: mol_type = other DNA
atggcgtttaccattggtttaacaggagggatcgcagcgggcaaatcgactgtgagtgccatgatgcgtgaactgggtctgccggtcatcgatgctgacgaggcagcacgcgccgttatgcgtccaggcgaagaagcttatcgccagattgtagctgcgttcggtccgggcattcttcgtgccgatggcgagatcgatcgccagaaactgggtgcgatccgcttttcggacgaacaacaacgtctggtgctgaatgcgattgtaggtcctgcagtcctgaagaagatgctcgctgagaaagaagctcatatccgctcaggcgccaagacggttgtgctggatatcccgctgctgttcgaatccggattgagccattgggtcgacaaagtgctcgtggtgtacgtcgatgatgatgttcagttacgccgccttatggcacgtaacgggtttactgaagaagaagctctgaagcgcattcgttcacagtggcccagtatcgagaaagttaaacgtgcagacgctgtcatcgacaataatggcacggaggaagaaacccgccgccagctgctggccattttacaccagtgggatctgctgggtaagggtggctccggccaccatcatcaccatcac

SEQ ID NO: 550 - protein, 211 aa, synthetic construct
  REGION 1..211: note = Variant of 3'O-kinase
MAFTIGLTGGIAAGKSTVSAMMRELGLPVIDADEAARAVMRPGEEAYRQIVAAFGPGILRADGEIDRQKLGAIRFSDEQQRLVLNAIVGPAVLKKMLAEKEAHIRSGAKTVVLDIPLLFESGLSHWVDKVLVVYVDDDVQLRRLMARNGFTEEEALKRIRSQWPSIEKVKRADAVIDNNGTEEETRRQLLAILHQWDLLGKGGSGHHHHHH

SEQ ID NO: 551 - DNA, 633 bp, synthetic construct
  misc_feature 1..633: note = Variant of 3'O-kinase
  source 1..633: mol_type = other DNA
atggcgtttaccattggtttaacaggagggatcgcagcgggcaaatcgactgtgagtgccatgatgcgtgaactgggtctgccggtcatcgatgctgacgaggcagcacgcgccgttatggtcccaggcgaagaagcgtatcgccagattgtagctgcgttcggtccgggcattcttcgtgccgatggcgagatcgatcgccagaaactgggtgctatccgcttttcggacgaacaacaacgtaagatgctgaattcgattgtaggtcctgcagtcctgaagaagatgctcgctgagaaagaagctcatatccgctcaggcgccaagacggttgtgctggatatcccgctgctgttcgaatccggattgacccattgggtcgacaaagtgctcgtggtgtacgtcgatgatgatgttcagttacgccgccttatggcacgtaacgggtttactgaagaagaagctctgaagcgcattcgttcacagtggcccagtgcggagaaagttaaacgtgcagacgctgtcatcgacaataatggcaatattgaagaaacccgccgccagctggtggacattttacaccagtgggatctgctgggtaagggtggctccggccaccatcatcaccatcac

SEQ ID NO: 552 - protein, 211 aa, synthetic construct
  REGION 1..211: note = Variant of 3'O-kinase
MAFTIGLTGGIAAGKSTVSAMMRELGLPVIDADEAARAVMVPGEEAYRQIVAAFGPGILRADGEIDRQKLGAIRFSDEQQRKMLNSIVGPAVLKKMLAEKEAHIRSGAKTVVLDIPLLFESGLTHWVDKVLVVYVDDDVQLRRLMARNGFTEEEALKRIRSQWPSAEKVKRADAVIDNNGNIEETRRQLVDILHQWDLLGKGGSGHHHHHH

SEQ ID NO: 553 - DNA, 633 bp, synthetic construct
  misc_feature 1..633: note = Variant of 3'O-kinase
  source 1..633: mol_type = other DNA
atggcgtttaccattggtttaacaggagggatcgcagcgggcaaatcgactgtgagtgccatgatgcgtgaactgggtctgccggtcatcgatgctgacgaggcagcacgcgccgttatggtcccaggcgaagaagcgtatcgccagattgtagctgcgttcggtccgggcattcttcgtgccgatggcgagatcgatcgccagaaactgggtgctatccgcttttcggacgaacaacaacgtaaggtgctgaatgcgattgtaggtcctgcagtcctgaagaaaatgctcgctgagaaagaagctcatatccgctcaggcgccaagacggttgtgctggatatcccactgctgttcgaatccggattgacccattgggtcgacaaagtgctcgtggtgtacgtcgatgatgatgttcagttacgccgccttatggcacgtaacgggtttactgaagaagaagctctgaagcgcattcgttcacagtggcccagtgcggagaaagttaaacgtgcagacgctgtcatcgacaataatggcaatattgaagaaacccgccgccagctgctggacattttacaccagtgggatctgctgggtaagggtggctccggccaccatcatcaccatcac

SEQ ID NO: 554 - protein, 211 aa, synthetic construct
  REGION 1..211: note = Variant of 3'O-kinase
MAFTIGLTGGIAAGKSTVSAMMRELGLPVIDADEAARAVMVPGEEAYRQIVAAFGPGILRADGEIDRQKLGAIRFSDEQQRKVLNAIVGPAVLKKMLAEKEAHIRSGAKTVVLDIPLLFESGLTHWVDKVLVVYVDDDVQLRRLMARNGFTEEEALKRIRSQWPSAEKVKRADAVIDNNGNIEETRRQLLDILHQWDLLGKGGSGHHHHHH

SEQ ID NO: 555 - DNA, 633 bp, synthetic construct
  misc_feature 1..633: note = Variant of 3'O-kinase
  source 1..633: mol_type = other DNA
atggcgtttaccattggtttaacaggagggatcgcagcgggcaaatcgactgtgagtgccatgatgcgtgaactgggtctgccggtcatcgatgctgacgaggcagcacgcgccgttatgcgtccaggcgaagaagcgtatcgccagattgtagctgcgttcggtccgggcattcttcgtgccgatggcgagatcgatcgccagaaactgggtgctatccgcttttcggacgaacaacaacgtaaggtgctgaattcgattgtaggtcctgcagtcctgaagaagatgctcgctgagaaagaagctcatatccgctcaggcgccaagacggttgtgctggatatcccgctgctgttcgaatccggattgacccattgggtcgacaaagtgctcgtggtgtacgtcgatgatgatgttcagttacgccgccttatggcacgtaacgggtttactgaagaagaagctctgaagcgcattcgttcacagtggcccagtgcggagaaagttaaacgtgcagacgctgtcatcgacaataatggcacgattgaagaaacccgccgccagctgctggccattttacaccagtgggatctgctgggtaagggtggctccggccaccatcatcaccatcac

SEQ ID NO: 556 - protein, 211 aa, synthetic construct
  REGION 1..211: note = Variant of 3'O-kinase
MAFTIGLTGGIAAGKSTVSAMMRELGLPVIDADEAARAVMRPGEEAYRQIVAAFGPGILRADGEIDRQKLGAIRFSDEQQRKVLNSIVGPAVLKKMLAEKEAHIRSGAKTVVLDIPLLFESGLTHWVDKVLVVYVDDDVQLRRLMARNGFTEEEALKRIRSQWPSAEKVKRADAVIDNNGTIEETRRQLLAILHQWDLLGKGGSGHHHHHH

SEQ ID NO: 557 - DNA, 633 bp, synthetic construct
  misc_feature 1..633: note = Variant of 3'O-kinase
  source 1..633: mol_type = other DNA
atggcgtttaccattggtttaacaggagggatcgcagcgggcaaatcgactgtgagtgccatgatgcgtgaactgggtctgccggtcatcgatgctgacgaggcagcacgcgccgttatgcgtccaggcgaagaagcttatcgccagattgtagctgcgttcggtccgggcattcttcgtgccgatggcgagatcgatcgccagaaactgggtgcgatccgcttttcggacgaacaacaacgtaaggtgctgaatgcgattgtgggtcctgaagtcctgaagaagatgctcgctgagaaagaagctcatatccgctcaggcgccaagacggttgtgctggatatcccgctgctgttcgaatccggattgacccattgggtcgacaaagtgctcgtggtgtacgtcgatgatgatgttcagttacgccgccttatggcacgtaacgggtttactgaagaagaagctctgaagcgcattcgttcacagtggcccagtgcggagaaagttaaacgtgcagacgctgtcatcgacaataatggcacgattgaagaaacccgccgccagctgctggccattttacaccagtgggatctgctgggtaagggtggctccggccaccatcatcaccatcac

SEQ ID NO: 558 - protein, 211 aa, synthetic construct
  REGION 1..211: note = Variant of 3'O-kinase
MAFTIGLTGGIAAGKSTVSAMMRELGLPVIDADEAARAVMRPGEEAYRQIVAAFGPGILRADGEIDRQKLGAIRFSDEQQRKVLNAIVGPEVLKKMLAEKEAHIRSGAKTVVLDIPLLFESGLTHWVDKVLVVYVDDDVQLRRLMARNGFTEEEALKRIRSQWPSAEKVKRADAVIDNNGTIEETRRQLLAILHQWDLLGKGGSGHHHHHH

SEQ ID NO: 559 - DNA, 633 bp, synthetic construct
  misc_feature 1..633: note = Variant of 3'O-kinase
  source 1..633: mol_type = other DNA
atggcgtttaccattggtttaacaggagggatcgcagcgggcaaatcgactgtgagtgccatgatgcgtgaactgggtctgccggtcatcgatgctgacgaggcagcacgcgccgttatgcgtccaggcgaagaagcttatcgtcagattgtagctgcgttcggtccgggcattcttcgtgccgatggcgagatcgatcgccagaaactgggtgctatccgcttttcggacgaacaacaactgaaggtgctgaatgcgattgtaggtcctgcagtcctgaagaagatgctcgctgagaaagaagctcacatccgctcaggcgccaagacggttgtgctggatatcccgctgctgttcgaatccggattgacccattgggtcgacaaagtgctcgtggtgtacgtcgatgatgatgttcagttacgccgccttatggcacgtaacgggtttactgaagaagaagctctgaagcgcattcgttcacagtggcccagtgcggagaaagttaaacgtgcagacgcttggatcgacaataatggcacgattgaagaaacccgccgccagctgctggccattttacaccagtgggatctgctggagaagggtggctccggccaccatcatcaccatcac

SEQ ID NO: 560 - protein, 211 aa, synthetic construct
  REGION 1..211: note = Variant of 3'O-kinase
MAFTIGLTGGIAAGKSTVSAMMRELGLPVIDADEAARAVMRPGEEAYRQIVAAFGPGILRADGEIDRQKLGAIRFSDEQQLKVLNAIVGPAVLKKMLAEKEAHIRSGAKTVVLDIPLLFESGLTHWVDKVLVVYVDDDVQLRRLMARNGFTEEEALKRIRSQWPSAEKVKRADAWIDNNGTIEETRRQLLAILHQWDLLEKGGSGHHHHHH

SEQ ID NO: 561 - DNA, 633 bp, synthetic construct
  misc_feature 1..633: note = Variant of 3'O-kinase
  source 1..633: mol_type = other DNA
atggcgtttaccattggtttaacaggagggatcgcagcgggcaaatcgactgtgagtgccatgatgcgtgaactgggtctgccggtcatcgatgctgacgaggcagcacgcgccgttatgcgtccaggcgaagaagcttatcgtcagattgtagctgcgttcggtccgggcattcttcgtgccgatggcgagatcgatcgccagaaactgggtgctatccgcttttcggacgaacaacaactgaaggtgctgaatgcgattgtaggtcctgcagtcctgaagaagatgctcgctgagaaagaagctcatatccgctcaggcgccaagacggttgtgctggatatcccgctgctgttcgaatccggattgacccattgggtcgacaaagtgctcgtggtgtacgtcgatgatgatgttcagttacgccgccttatggcacgtaacgggtttactgaagaagaagctctgaagcgcattcgttcacagtggcccagtgcggagaaagttaaacgtgcagacgctgtgatcgacaataatggcacgattgaagaaacccgccgccagctgctggccattttacaccagtgggatctgctgggtaagggtggctccggccaccatcatcaccatcac

SEQ ID NO: 562 - protein, 211 aa, synthetic construct
  REGION 1..211: note = Variant of 3'O-kinase
MAFTIGLTGGIAAGKSTVSAMMRELGLPVIDADEAARAVMRPGEEAYRQIVAAFGPGILRADGEIDRQKLGAIRFSDEQQLKVLNAIVGPAVLKKMLAEKEAHIRSGAKTVVLDIPLLFESGLTHWVDKVLVVYVDDDVQLRRLMARNGFTEEEALKRIRSQWPSAEKVKRADAVIDNNGTIEETRRQLLAILHQWDLLGKGGSGHHHHHH

SEQ ID NO: 563 - DNA, 633 bp, synthetic construct
  misc_feature 1..633: note = Variant of 3'O-kinase
  source 1..633: mol_type = other DNA
atggcgtttaccattggtttaacaggagggatcgcagcgggcaaatcgactgtgagtgccatgatgcgtgaactgggtctgccggtcatcgatgctgacgaggcagcacgcgccgttatgcgtccaggcgaagaagcttatcgccagattgtagctgcgttcggtccgggcattcttcgtgccgatggcgagatcgatcgccagaaactgggtgctatccgcttttcggacgaacaacaactgaaggtgctgaatgcgattgtaggtcctgcagtcctgaagaagatgctcgctgagaaagaagctcacatccgctcaggcgccaagacggttgtgctggatatcccgctgctgttcgaatccggattgacccattgggtcgacaaagtgctcgtggtgtacgttgatgatgatgttcagttacgccgccttatggcacgtaacgggtttactgaagaagaagctctgaagcgcattcgttcacagtggcccagtgcggagaaagttaaacgtgcagacgcttggatcgacaataatggcacgattgaagaaacccgccgccagctgctggccattttacaccagtgggatctgctgaataagggtggctccggccaccatcatcaccatcac

SEQ ID NO: 564 - protein, 211 aa, synthetic construct
  REGION 1..211: note = Variant of 3'O-kinase
MAFTIGLTGGIAAGKSTVSAMMRELGLPVIDADEAARAVMRPGEEAYRQIVAAFGPGILRADGEIDRQKLGAIRFSDEQQLKVLNAIVGPAVLKKMLAEKEAHIRSGAKTVVLDIPLLFESGLTHWVDKVLVVYVDDDVQLRRLMARNGFTEEEALKRIRSQWPSAEKVKRADAWIDNNGTIEETRRQLLAILHQWDLLNKGGSGHHHHHH

SEQ ID NO: 565 - DNA, 633 bp, synthetic construct
  misc_feature 1..633: note = Variant of 3'O-kinase
  source 1..633: mol_type = other DNA
atggcgtttaccattggtttaacaggagggatcgcagcgggcaaatcgactgtgagtgccatgatgcgtgaactgggtctgccggtcatcgatgctgacgaggcagcacgcgccgttatgcgtccaggcgaagaagcttatcgccagattgtagctgcgttcggtccgggcattcttcgtgccgatggcgagatcgatcgccagaaactgggtcatatccgcttttcggacgaacaacaacgtgaggtgctgaatgcgattgtgggtcctgaagtcctgaagaagatgctcgctgagaaagaagctcatatccgctcaggcgccaagacggttgtgctggatatcccgctgctgttcgaatccggattgacccattgggtcgacaaagtgctcgtggtgtacgtcgatgatgatgttcagttacgccgccttatggcacgtaacgggtttactgaagaagaagctctgaagcgcattcgttcacagtggcccagtgcagagaaagttaaacgtgcagacgctgtcatcgacaataatggcacgattgaagaaacccgccgccagctgctggccattttacaccagtgggatctgctgggtaagggtggctccggccaccatcatcaccatcac

SEQ ID NO: 566 - protein, 211 aa, synthetic construct
  REGION 1..211: note = Variant of 3'O-kinase
MAFTIGLTGGIAAGKSTVSAMMRELGLPVIDADEAARAVMRPGEEAYRQIVAAFGPGILRADGEIDRQKLGHIRFSDEQQREVLNAIVGPEVLKKMLAEKEAHIRSGAKTVVLDIPLLFESGLTHWVDKVLVVYVDDDVQLRRLMARNGFTEEEALKRIRSQWPSAEKVKRADAVIDNNGTIEETRRQLLAILHQWDLLGKGGSGHHHHHH

SEQ ID NO: 567 - DNA, 633 bp, synthetic construct
  misc_feature 1..633: note = Variant of 3'O-kinase
  source 1..633: mol_type = other DNA
atggcgtttaccattggtttaacaggagggatcgcagcgggcaaatcgactgtgagtgccatgatgcgtgaactgggtctgccggtcatcgatgctgacgaggcagcacgcgccgttatgcgtccaggcgaagaagcttatcgccagattgtagctgcgttcggtccgggcattcttcgtgccgatggcgagatcgatcgccagaaactgggtcatatccgcttttcggacgaacaacaacgtacggtgctgaatgcgattctgggtcctgcagtcctgaagaagatgctcgctgagaaagaagctcatatccgctcaggcgccaagacggttgtgctggatatcccgctgctgttcgaatccggattgcagcattgggtcgacaaagtgctcgtggtgtacgtcgatgatgatgttcagttacgccgccttatggcacgtaacgggtttactgaagaagaagctctgaagcgcattcgttcacagtggcccagtgaagagaaagttaaacgtgcagacgctgtcatcgacaataatggcacgatcgaagaaacccgccgccagctgctggccattttacaccagtgggatctgctgggtaagggtggctccggccaccatcatcaccatcac

SEQ ID NO: 568 - protein, 211 aa, synthetic construct
  REGION 1..211: note = Variant of 3'O-kinase
MAFTIGLTGGIAAGKSTVSAMMRELGLPVIDADEAARAVMRPGEEAYRQIVAAFGPGILRADGEIDRQKLGHIRFSDEQQRTVLNAILGPAVLKKMLAEKEAHIRSGAKTVVLDIPLLFESGLQHWVDKVLVVYVDDDVQLRRLMARNGFTEEEALKRIRSQWPSEEKVKRADAVIDNNGTIEETRRQLLAILHQWDLLGKGGSGHHHHHH

SEQ ID NO: 569 - DNA, 633 bp, synthetic construct
  misc_feature 1..633: note = Variant of 3'O-kinase
  source 1..633: mol_type = other DNA
atggcgtttaccattggtttaacaggagggatcgcagcgggcaaatcgactgtgagtgccatgatgcgtgaactgggtctgccggtcatcgatgctgacgaggcagcacgcgccgttatgcgtccaggcgaagaagcttatcatcagattgtagctgcgttcggtccgggcattcttcgtgccgatggcgagatcgatcgccagaaactgggtgctatccgcttttcggacgaacaacaacgcaaggtgctgaatgcgattgtaggtcctgcagtcctgaagaagatgctcgctgagaaagaagctcatatccgctcaggcgccaagacggttgtgctggatatcccgctgctgttcgaatccggattgacccattgggtcgacaaagtgctcgtggtgtacgtcgatgatgatgttcagttacgccgccttatggcacgtaacgggtttactgaagaagaagctctgaagcgcattcgttcacagtggcccagtgcggagaaagttaaacgtgcagacgctgtcatcgacaataatggcacgattgaagaaacccgccgccagctgctggccattttacaccagtgggatctgctgaataagggtggctccggccaccatcatcaccatcac

SEQ ID NO: 570 - protein, 211 aa, synthetic construct
  REGION 1..211: note = Variant of 3'O-kinase
MAFTIGLTGGIAAGKSTVSAMMRELGLPVIDADEAARAVMRPGEEAYHQIVAAFGPGILRADGEIDRQKLGAIRFSDEQQRKVLNAIVGPAVLKKMLAEKEAHIRSGAKTVVLDIPLLFESGLTHWVDKVLVVYVDDDVQLRRLMARNGFTEEEALKRIRSQWPSAEKVKRADAVIDNNGTIEETRRQLLAILHQWDLLNKGGSGHHHHHH

SEQ ID NO: 571 - DNA, 633 bp, synthetic construct
  misc_feature 1..633: note = Variant of 3'O-kinase
  source 1..633: mol_type = other DNA
atggcgtttaccattggtttaacaggagggatcgcagcgggcaaatcgactgtgagtgccatgatgcgtgaactgggtctgccggtcatcgatgctgacgaggcagcacgcgccgttatgaagccaggcgaagaagcgtatcgccagattgtagctgcgttcggtccgggcattcttcgtgccgatggcgagatcgatcgccagaaactgggtgctatccgcttttcggacgaacaacaacgtaaggtgctgaatgcgattgtaggtcctgcagtcctgaagataatgctcgctgagaaagaagctcatatccgctcaggcgccaagacgattgtgctggatatcccgctgctgttcgaatccggattgacccattgggtcgacaaagtgctcgtggtgtacgtcgatgatgatgttcagttacgccgccttatggcacgtaacgggtttactgaagaagaagctctgaagcgcattcgttcacagtggcccagtgcggagaaagttaaacgtgcagacgctgtcatcgacaataatggcaatattgaagaaacccgccgccagctggtggacattttacaccagtgggatctgctgggtaagggtggctccggccaccatcatcaccatcac

SEQ ID NO: 572 - protein, 211 aa, synthetic construct
  REGION 1..211: note = Variant of 3'O-kinase
MAFTIGLTGGIAAGKSTVSAMMRELGLPVIDADEAARAVMKPGEEAYRQIVAAFGPGILRADGEIDRQKLGAIRFSDEQQRKVLNAIVGPAVLKIMLAEKEAHIRSGAKTIVLDIPLLFESGLTHWVDKVLVVYVDDDVQLRRLMARNGFTEEEALKRIRSQWPSAEKVKRADAVIDNNGNIEETRRQLVDILHQWDLLGKGGSGHHHHHH

SEQ ID NO: 573 - DNA, 633 bp, synthetic construct
  misc_feature 1..633: note = Variant of 3'O-kinase
  source 1..633: mol_type = other DNA
atggcgtttaccattggtttaacaggagggatcgcagcgggcaaatcgactgtgagtgccatgatgcgtgaactgggtctgccggtcatcgatgctgacgaggcagcacgcgccgttatgcgtccaggcgaagaagcttatcgccagattgtagctgcgttcggtccgggcattcttcgtgccgatggcgagatcgatcgccagaaactgggtcatatccgcttttcggacgaacaacaacgtaaggtgctgaatgcgattgtaggtcctgcagtcctgaagaagatgctcgctgagaaagaagctcatatccgctcaggcgccaagacggttgtgctggatatcccgctgctgttcgaatccggattgacccattgggtcgacaaagtgctcgtggtgtacgtcgatgatgatgttcagttacgccgccttatggcacgtaacgggtttactgaagaagaagctctgaagcgcattcgttcacagtggcccagtgcagagaaagttaaacgtgcagacgctgtcatcgacaataatggcacggaggaagaaacccgccgccagctgctggccattttacaccagtgggatctgctgggtaagggtggctccggccaccatcatcaccatcac

SEQ ID NO: 574 - protein, 211 aa, synthetic construct
  REGION 1..211: note = Variant of 3'O-kinase
MAFTIGLTGGIAAGKSTVSAMMRELGLPVIDADEAARAVMRPGEEAYRQIVAAFGPGILRADGEIDRQKLGHIRFSDEQQRKVLNAIVGPAVLKKMLAEKEAHIRSGAKTVVLDIPLLFESGLTHWVDKVLVVYVDDDVQLRRLMARNGFTEEEALKRIRSQWPSAEKVKRADAVIDNNGTEEETRRQLLAILHQWDLLGKGGSGHHHHHH

SEQ ID NO: 575 - DNA, 633 bp, synthetic construct
  misc_feature 1..633: note = Variant of 3'O-kinase
  source 1..633: mol_type = other DNA
atggcgtttaccattggtttaacaggagggatcgcagcgggcaaatcgactgtgagtgccatgatgcgtgaactgggtctgccggtcatcgatgctgacgaggcagcacgcgccgttatgcgtccaggcgaagaagcttatcgccagattgtagctgcgttcggtccgggcattcttcgtgccgatggcgagatcgatcgccagaaactgggtgcgatccgcttttcggacgaacaacaacgtaaggtgctgaatgcgattgtaggtcctgcagtcctgaagaagatgctcgctgagaaagaagctcatatccgctcaggcgccaagacggttgtgctggatatcccgctgctgttcgaatccggattgagccattgggtcgacaaagtgctcgtggtgtacgtcgatgatgatgttcagttacgccgccttatggcacgtaacgggtttactgaagaagaagctctgaagcgcattcgttcacagtggcccagtgcagagaaagttaaacgtgcagacgctgtcatcgacaataatggcacgattgaagaaacccgccgccagctgctggccattttacaccagtgggatctgctgggtaagggtggctccggccaccatcatcaccatcac

SEQ ID NO: 576 - protein, 211 aa, synthetic construct
  REGION 1..211: note = Variant of 3'O-kinase
MAFTIGLTGGIAAGKSTVSAMMRELGLPVIDADEAARAVMRPGEEAYRQIVAAFGPGILRADGEIDRQKLGAIRFSDEQQRKVLNAIVGPAVLKKMLAEKEAHIRSGAKTVVLDIPLLFESGLSHWVDKVLVVYVDDDVQLRRLMARNGFTEEEALKRIRSQWPSAEKVKRADAVIDNNGTIEETRRQLLAILHQWDLLGKGGSGHHHHHH

SEQ ID NO: 577 - DNA, 633 bp, synthetic construct
  misc_feature 1..633: note = Variant of 3'O-kinase
  source 1..633: mol_type = other DNA
atggcgtttaccattggtttaacaggagggatcgcagcgggcaaatcgactgtgagtgccatgatgcgtgaactgggtctgccggtcatcgatgctgacgaggcagcacgcgccgttatgcgtccaggcgaagaaacgtatcgccagattgtagctgcgttcggtccgggcattcttcgtgccgatggcgagatcgatcgccagaaactgggtgctatccgcttttcggacgaacaacaacgtaagatgctgaatgcgattgtaggtcctgcagtcctgaagaaaatgctcgctgagaaagaagctcatatccgctcaggcgccaagacggttgtgctggatatcccgctgctgttcgaatccggattgacccattgggtcgacaaagtgctcgtggtgtacgtcgatgatgatgttcagttacgccgccttatggcacgtaacgggtttactgaagaagaagctctgaagcgcattcgttcacagtggcccagtgcggagaaagttaaacgtgcagacgctgtcatcgacaataatggcactattgaagaaacccgccgccagctggtggacattttacaccagtgggatctgctgggtaagggtggctccggccaccatcatcaccatcac

SEQ ID NO: 578 - protein, 211 aa, synthetic construct
  REGION 1..211: note = Variant of 3'O-kinase
MAFTIGLTGGIAAGKSTVSAMMRELGLPVIDADEAARAVMRPGEETYRQIVAAFGPGILRADGEIDRQKLGAIRFSDEQQRKMLNAIVGPAVLKKMLAEKEAHIRSGAKTVVLDIPLLFESGLTHWVDKVLVVYVDDDVQLRRLMARNGFTEEEALKRIRSQWPSAEKVKRADAVIDNNGTIEETRRQLVDILHQWDLLGKGGSGHHHHHH

SEQ ID NO: 579 - DNA, 633 bp, synthetic construct
  misc_feature 1..633: note = Variant of 3'O-kinase
  source 1..633: mol_type = other DNA
atggcgtttaccattggtttaacaggagggatcgcagcgggcaaatcgactgtgagtgccatgatgcgtgaactgggtctgccggtcatcgatgctgacgaggcagcacgcgccgttatgcgtccaggcgaagaagcttatcgtcagattgtagctgcgttcggtccgggcattcttcgtgccgatggcgagatcgatcgccagaaactgggtgctatccgcttttcggacgaacaacaacgtaaggtgctgaatgcgattgtaggtcctgcagtcctgaagaagatgctcgctgagaaagaagctcatatccgctcaggcgccaagacggttgtgctggatatcccgctgctgttcgaatccggattgacccattgggtcgacaaagtgctcgtggtgtacgtcgatgatgatgttcagttacgccgccttatggcacgtaacgggtttactgaagaagaagctctgaagcgcattcgttcacagtggcccagtgcggagaaagttaaacgtgcagacgcttggatcgacaataatggcacgattgaagaaacccgccgccagctgctggccattttacaccagtgggatctgctgggtaagggtggctccggccaccatcatcaccatcac

SEQ ID NO: 580 - protein, 211 aa, synthetic construct
  REGION 1..211: note = Variant of 3'O-kinase
MAFTIGLTGGIAAGKSTVSAMMRELGLPVIDADEAARAVMRPGEEAYRQIVAAFGPGILRADGEIDRQKLGAIRFSDEQQRKVLNAIVGPAVLKKMLAEKEAHIRSGAKTVVLDIPLLFESGLTHWVDKVLVVYVDDDVQLRRLMARNGFTEEEALKRIRSQWPSAEKVKRADAWIDNNGTIEETRRQLLAILHQWDLLGKGGSGHHHHHH

SEQ ID NO: 581 - DNA, 633 bp, synthetic construct
  misc_feature 1..633: note = Variant of 3'O-kinase
  source 1..633: mol_type = other DNA
atggcgtttaccattggtttaacaggagggatcgcagcgggcaaatcgactgtgagtgccatgatgcgtgaactgggtctgccggtcatcgatgctgacgaggcagcacgcgccgttatgcgtccaggcgaagaagcttatcgccagattgtagctgcgttcggtccgggcattcttcgtgccgatggcgagatcgatcgccagaaactgggtcatatccgcttttcggacgaacaacaacgtaaggtgctgaatgcgattgtaggtcctgcagtcctgaagaagatgctcgctgagaaagaagctcatatccgctcaggcgccaagacggttgtgctggatatcccgctgctgttcgaatccggattgacccattgggtcgacaaagtgctcgtggtgtacgtcgatgatgatgttcagttacgccgccttatggcacgtaacgggtttactgaagaagaagctctgaagcgcattcgttcacagtggcccagtgcagagaaagttaaacgtgcagacgctgtcatcgacaataatggcacgatcgaagaaacccgccgccagctgctggccattttacaccagtgggatctgctgggtaagggtggctccggccaccatcatcaccatcac

SEQ ID NO: 582 - protein, 211 aa, synthetic construct
  REGION 1..211: note = Variant of 3'O-kinase
MAFTIGLTGGIAAGKSTVSAMMRELGLPVIDADEAARAVMRPGEEAYRQIVAAFGPGILRADGEIDRQKLGHIRFSDEQQRKVLNAIVGPAVLKKMLAEKEAHIRSGAKTVVLDIPLLFESGLTHWVDKVLVVYVDDDVQLRRLMARNGFTEEEALKRIRSQWPSAEKVKRADAVIDNNGTIEETRRQLLAILHQWDLLGKGGSGHHHHHH

SEQ ID NO: 583 - DNA, 633 bp, synthetic construct
  misc_feature 1..633: note = Variant of 3'O-kinase
  source 1..633: mol_type = other DNA
atggcgtttaccattggtttaacaggagggatcgcagcgggcaaatcgactgtgagtgccatgatgcgtgaactgggtctgccggtcatcgatgctgacgaggcagcacgcgccgttatgcgtccaggcgaagaagcttatcgccagattgtagctgcgttcggtccgggcattcttcgtgccgatggcgagatcgatcgccagaaactgggtcatatccgcttttcggacgaacaacaacgtaaggtgctgaatgcgattgtaggtcctgcagtcctgaagaagatgctcgctgagaaagaagctcatatccgctcaggcgccaagacggttgtgctggatatcccgctgctgttcgaatccggattgacccattgggtcgacaaagtgctcgtggtgtacgtcgatgatgatgttcagttacgccgccttatggcacgtaacgggtttactgaagaagaagctctgaagcgcattcgttcacagtggcccagtgaagagaaagttaaacgtgcagacgctgtcatcgacaataatggcacgattgaagaaacccgccgccagctgctggccattttacaccagtgggatctgctgggtaagggtggctccggccaccatcatcaccatcac

SEQ ID NO: 584 - protein, 211 aa, synthetic construct
  REGION 1..211: note = Variant of 3'O-kinase
MAFTIGLTGGIAAGKSTVSAMMRELGLPVIDADEAARAVMRPGEEAYRQIVAAFGPGILRADGEIDRQKLGHIRFSDEQQRKVLNAIVGPAVLKKMLAEKEAHIRSGAKTVVLDIPLLFESGLTHWVDKVLVVYVDDDVQLRRLMARNGFTEEEALKRIRSQWPSEEKVKRADAVIDNNGTIEETRRQLLAILHQWDLLGKGGSGHHHHHH

SEQ ID NO: 585 - DNA, 633 bp, synthetic construct
  misc_feature 1..633: note = Variant of 3'O-kinase
  source 1..633: mol_type = other DNA
atggcgtttaccattggtttaacaggagggatcgcagcgggcaaatcgactgtgagtgccatgatgcgtgaactgggtctgccggtcatcgatgctgacgaggcagcacgcgccgttatgcgtccaggcgaagaagcttatcgccagattgtagctgcgttcggtccgggcattcttcgtgccgatggcgagatcgatcgccagaaactgggtgctatccgcttttcggacgaacaacaacgcaaggtgctgaatgcgattgtaggtcctgcagtcctgaagaagatgctcgctgagaaagaagctctgatccgctcaggcgccaagacggttgtgctggatatcccgctgctgttcgaatccggattgacccattgggtcgacaaagtgctcgtggtgtacgtcgatgatgatgttcagttacgccgccttatggcacgtaacgggtttactgaagaagaagctctgaagcgcattcgttcacagtggcccagtgcggagaaagttaaacgtgcagacgcttggatcgacaataatggcacgattgaagaaacccgccgccagctgctggccattttacaccagtgggatctgctggataagggtggctccggccaccatcatcaccatcac

SEQ ID NO: 586 - protein, 211 aa, synthetic construct
  REGION 1..211: note = Variant of 3'O-kinase
MAFTIGLTGGIAAGKSTVSAMMRELGLPVIDADEAARAVMRPGEEAYRQIVAAFGPGILRADGEIDRQKLGAIRFSDEQQRKVLNAIVGPAVLKKMLAEKEALIRSGAKTVVLDIPLLFESGLTHWVDKVLVVYVDDDVQLRRLMARNGFTEEEALKRIRSQWPSAEKVKRADAWIDNNGTIEETRRQLLAILHQWDLLDKGGSGHHHHHH

SEQ ID NO: 587 - DNA, 633 bp, synthetic construct
  misc_feature 1..633: note = Variant of 3'O-kinase
  source 1..633: mol_type = other DNA
atggcgtttaccattggtttaacaggagggatcgcagcgggcaaatcgactgtgagtgccatgatgcgtgaactgggtctgccggtcatcgatgctgacgaggcagcacgcgccgttatgaagccaggcgaagaaacgtatcgccagattgtagctgcgttcggtccgggcattcttcgtgccgatggcgagatcgatcgccagaaactgggtgctatccgcttttcggacgaacaacaacgtaaggtgctgaattcgattgtaggtcctgcagtcctgaagattatgctcgctgagaaagaagctcatatccgctcaggcgccaagacgattgtgctggatatcccgctgctgttcgaatccggattgacccattgggtcgacaaagtgctcgtggtgtacgtcgatgatgatgttcagttacgccgccttatggcacgtaacgggtttactgaagaagaagctctgaagcgcattcgttcacagtggcccagtgcggagaaagttaaacgtgcagacgctgtcatcgacaataatggcactattgaagaaacccgccgccagctgctggccattttacaccagtgggatctgctgggtaagggtggctccggccaccatcatcaccatcac

SEQ ID NO: 588 - protein, 211 aa, synthetic construct
  REGION 1..211: note = Variant of 3'O-kinase
MAFTIGLTGGIAAGKSTVSAMMRELGLPVIDADEAARAVMKPGEETYRQIVAAFGPGILRADGEIDRQKLGAIRFSDEQQRKVLNSIVGPAVLKIMLAEKEAHIRSGAKTIVLDIPLLFESGLTHWVDKVLVVYVDDDVQLRRLMARNGFTEEEALKRIRSQWPSAEKVKRADAVIDNNGTIEETRRQLLAILHQWDLLGKGGSGHHHHHH

SEQ ID NO: 589 - DNA, 633 bp, synthetic construct
  misc_feature 1..633: note = Variant of 3'O-kinase
  source 1..633: mol_type = other DNA
atggcgtttaccattggtttaacaggagggatcgcagcgggcaaatcgactgtgagtgccatgatgcgtgaactgggtctgccggtcatcgatgctgacgaggcagcacgcgccgttatgcgtccaggcgaagaagcttatcgccagattgtagctgcgttcggtccgggcattcttcgtgccgatggcgagatcgatcgccagaaactgggtgcgatccgcttttcggacgaacaacaacgtctggtgctgaatgcgattgtaggtcctgcagtcctgaagaagatgctcgctgagaaagaagctcatatccgctcaggcgccaagacggttgtgctggatatcccgctgctgttcgaatccggattgcagcattgggtcgacaaagtgctcgtggtgtacgtcgatgatgatgttcagttacgccgccttatggcacgtaacgggtttactgaagaagaagctctgaagcgcattcgttcacagtggcccagtctggagaaagttaaacgtgcagacgctgtcatcgacaataatggcacgattgaagaaacccgccgccagctgctggccattttacaccagtgggatctgctgggtaagggtggctccggccaccatcatcaccatcac

SEQ ID NO: 590 - protein, 211 aa, synthetic construct
  REGION 1..211: note = Variant of 3'O-kinase
MAFTIGLTGGIAAGKSTVSAMMRELGLPVIDADEAARAVMRPGEEAYRQIVAAFGPGILRADGEIDRQKLGAIRFSDEQQRLVLNAIVGPAVLKKMLAEKEAHIRSGAKTVVLDIPLLFESGLQHWVDKVLVVYVDDDVQLRRLMARNGFTEEEALKRIRSQWPSLEKVKRADAVIDNNGTIEETRRQLLAILHQWDLLGKGGSGHHHHHH

SEQ ID NO: 591 - DNA, 633 bp, synthetic construct
  misc_feature 1..633: note = Variant of 3'O-kinase
  source 1..633: mol_type = other DNA
atggcgtttaccattggtttaacaggagggatcgcagcgggcaaatcgactgtgagtgccatgatgcgtgaactgggtctgccggtcatcgatgctgacgaggcagcacgcgccgttatgcgtccaggcgaagaagcttatcgccagattgtagctgcgttcggtccgggcattcttcgtgccgatggcgagatcgatcgccagaaactgggtcatatccgcttttcggacgaacaacaacgtctggtgctgaatgcgattgtaggtcctgcagtcctgaagaagatgctcgctgagaaagaagctcatatccgctcaggcgccaagacggttgtgctggatatcccgctgctgttcgaatccggattgacccattgggtcgacaaagtgctcgtggtgtacgtcgatgatgatgttcagttacgccgccttatggcacgtaacgggtttactgaagaagaagctctgaagcgcattcgttcacagtggcccagtatcgagaaagttaaacgtgcagacgctgtcatcgacaataatggcacgatcgaagaaacccgccgccagctgctggccattttacaccagtgggatctgctgggtaagggtggctccggccaccatcatcaccatcac

SEQ ID NO: 592 - protein, 211 aa, synthetic construct
  REGION 1..211: note = Variant of 3'O-kinase
MAFTIGLTGGIAAGKSTVSAMMRELGLPVIDADEAARAVMRPGEEAYRQIVAAFGPGILRADGEIDRQKLGHIRFSDEQQRLVLNAIVGPAVLKKMLAEKEAHIRSGAKTVVLDIPLLFESGLTHWVDKVLVVYVDDDVQLRRLMARNGFTEEEALKRIRSQWPSIEKVKRADAVIDNNGTIEETRRQLLAILHQWDLLGKGGSGHHHHHH

SEQ ID NO: 593 - DNA, 633 bp, synthetic construct
  misc_feature 1..633: note = Variant of 3'O-kinase
  source 1..633: mol_type = other DNA
atggcgtttaccattggtttaacaggagggatcgcagcgggcaaatcgactgtgagtgccatgatgcgtgaactgggtctgccggtcatcgatgctgacgaggcagcacgcgccgttatgcgtccaggcgaagaagcttatcgccagattgtagctgcgttcggtccgggcattcttcgtgccgatggcgagatcgatcgccagaaactgggtgcgatccgcttttcggacgaacaacaacgtaaggtgctgaatgcgattgtaggtcctgcagtcctgaagaagatgctcgctgagaaagaagctcatatccgctcaggcgccaagacggttgtgctggatatcccgctgctgttcgaatccggattgacccattgggtcgacaaagtgctcgtggtgtacgtcgatgatgatgttcagttacgccgccttatggcacgtaacgggtttactgaagaagaagctctgaagcgcattcgttcacagtggcccagtctggagaaagttaaacgtgcagacgctgtcatcgacaataatggcacgattgaagaaacccgccgccagctgctggccattttacaccagtgggatctgctgggtaagggtggctccggccaccatcatcaccatcac

SEQ ID NO: 594 - protein, 211 aa, synthetic construct
  REGION 1..211: note = Variant of 3'O-kinase
MAFTIGLTGGIAAGKSTVSAMMRELGLPVIDADEAARAVMRPGEEAYRQIVAAFGPGILRADGEIDRQKLGAIRFSDEQQRKVLNAIVGPAVLKKMLAEKEAHIRSGAKTVVLDIPLLFESGLTHWVDKVLVVYVDDDVQLRRLMARNGFTEEEALKRIRSQWPSLEKVKRADAVIDNNGTIEETRRQLLAILHQWDLLGKGGSGHHHHHH

SEQ ID NO: 595 - DNA, 633 bp, synthetic construct
  misc_feature 1..633: note = Variant of 3'O-kinase
  source 1..633: mol_type = other DNA
atggcgtttaccattggtttaacaggagggatcgcagcgggcaaatcgactgtgagtgccatgatgcgtgaactgggtctgccggtcatcgatgctgacgaggcagcacgcgccgttatgcgtccaggcgaagaaacgtatcgccagattgtagctgcgttcggtccgggcattcttcgtgccgatggcgagatcgatcgccagaaactgggtgctatccgcttttcggacgaacaacaacgtaaggtgctgaatgcgattgtaggtcctgcagtcctgaagaagatgctcgctgagaaagaagctcatatccgctcaggcgccaagacggttgtgctggatatcccgctgctgttcgaatccggattgacccattgggtcgacaaagtgctcgtggtgtacgtcgatgatgatgttcagttacgccgccttatggcacgtaacgggtttactgaagaagaagctctgaagcgcattcgttcacagtggcccagtgcggagaaagttaaacgtgcagacgctgtcatcgacaataatggcactattgaagaaacccgccgccagctggtggacattttacaccagtgggatctgctgggtaagggtggctccggccaccatcatcaccatcac

SEQ ID NO: 596 - protein, 211 aa, synthetic construct
  REGION 1..211: note = Variant of 3'O-kinase
MAFTIGLTGGIAAGKSTVSAMMRELGLPVIDADEAARAVMRPGEETYRQIVAAFGPGILRADGEIDRQKLGAIRFSDEQQRKVLNAIVGPAVLKKMLAEKEAHIRSGAKTVVLDIPLLFESGLTHWVDKVLVVYVDDDVQLRRLMARNGFTEEEALKRIRSQWPSAEKVKRADAVIDNNGTIEETRRQLVDILHQWDLLGKGGSGHHHHHH

SEQ ID NO: 597 - DNA, 633 bp, synthetic construct
  misc_feature 1..633: note = Variant of 3'O-kinase
  source 1..633: mol_type = other DNA
atggcgtttaccattggtttaacaggagggatcgcagcgggcaaatcgactgtgagtgccatgatgcgtgaactgggtctgccggtcatcgatgctgacgaggcagcacgcgccgttatgaagccaggcgaagaagcgtatcgccagattgtagctgcgttcggtccgggcattcttcgtgccgatggcgagatcgatcgccagaaactgggtgctatccgcttttcggacgaacaacaacgtaaggtgctgaatgcgattgtaggtcctgcagtcctgaagaaaatgctcgctgagaaagaagctcatatccgctcaggcgccaagacggttgtgctggatatcccgctgctgttcgaatccggattgacccattgggtcgacaaagtgctcgtggtgtacgtcgatgatgatgttcagttacgccgccttatggcacgtaacgggtttactgaagaagaagctctgaagcgcattcgttcacagtggcccagtgcggagaaagttaaacgtgcagacgctgtcatcgacaataatggcactattgaagaaacccgccgccagctggtggccattttacaccagtgggatctgctgggtaagggtggctccggccaccatcatcaccatcac

SEQ ID NO: 598 - protein, 211 aa, synthetic construct
  REGION 1..211: note = Variant of 3'O-kinase
MAFTIGLTGGIAAGKSTVSAMMRELGLPVIDADEAARAVMKPGEEAYRQIVAAFGPGILRADGEIDRQKLGAIRFSDEQQRKVLNAIVGPAVLKKMLAEKEAHIRSGAKTVVLDIPLLFESGLTHWVDKVLVVYVDDDVQLRRLMARNGFTEEEALKRIRSQWPSAEKVKRADAVIDNNGTIEETRRQLVAILHQWDLLGKGGSGHHHHHH

SEQ ID NO: 599 - DNA, 633 bp, synthetic construct
  misc_feature 1..633: note = Variant of 3'O-kinase
  source 1..633: mol_type = other DNA
atggcgtttaccattggtttaacaggagggatcgcagcgggcaaatcgactgtgagtgccatgatgcgtgaactgggtctgccggtcatcgatgctgacgaggcagcacgcgccgttatgcgtccaggcgaagaagcttatcgccagattgtagctgcgttcggtccgggcattcttcgtgccgatggcgagatcgatcgccagaaactgggtgcgatccgcttttcggacgaacaacaacgtaaggtgctgaatgcgattgtgggtcctgaagtcctgaagaagatgctcgctgagaaagaagctcatatccgctcaggcgccaagacggttgtgctggatatcccgctgctgttcgaatccggattgacccattgggtcgacaaagtgctcgtggtgtacgtcgatgatgatgttcagttacgccgccttatggcacgtaacgggtttactgaagaagaagctctgaagcgcattcgttcacagtggcccagtgaagagaaagttaaacgtgcagacgctgtcatcgacaataatggcacgattgaagaaacccgccgccagctgctggccattttacaccagtgggatctgctgggtaagggtggctccggccaccatcatcaccatcac

SEQ ID NO: 600 - protein, 211 aa, synthetic construct
  REGION 1..211: note = Variant of 3'O-kinase
MAFTIGLTGGIAAGKSTVSAMMRELGLPVIDADEAARAVMRPGEEAYRQIVAAFGPGILRADGEIDRQKLGAIRFSDEQQRKVLNAIVGPEVLKKMLAEKEAHIRSGAKTVVLDIPLLFESGLTHWVDKVLVVYVDDDVQLRRLMARNGFTEEEALKRIRSQWPSEEKVKRADAVIDNNGTIEETRRQLLAILHQWDLLGKGGSGHHHHHH

SEQ ID NO: 601 - DNA, 633 bp, synthetic construct
  misc_feature 1..633: note = Variant of 3'O-kinase
  source 1..633: mol_type = other DNA
atggcgtttaccattggtttaacaggagggatcgcagcgggcaaatcgactgtgagtgccatgatgcgtgaactgggtctgccggtcatcgatgctgacgaggcagcacgcgccgttatgaagccaggcgaagaagcgtatcgccagattgtagctgcgttcggtccgggcattcttcgtgccgatggcgagatcgatcgccagaaactgggtgctatccgcttttcggacgaacaacaacgtaaggtgctgaattcgattgtaggtcctgcagtcctgaagaaaatgctcgctgagaaagaagctcatatccgctcaggcgccaagacggttgtgctggatatcccgctgctgttcgaatccggattgacccattgggtcgacaaagtgctcgtggtgtacgtcgatgatgatgttcagttacgccgccttatggcacgtaacgggtttactgaagaagaagctctgaagcgcattcgttcacagtggcccagtgcggagaaagttaaacgtgcagacgctgtcatcgacaataatggcaatattgaagaaacccgccgccagctggtggacattttacaccagtgggatctgctgggtaagggtggctccggccaccatcatcaccatcac

SEQ ID NO: 602 - protein, 211 aa, synthetic construct
  REGION 1..211: note = Variant of 3'O-kinase
MAFTIGLTGGIAAGKSTVSAMMRELGLPVIDADEAARAVMKPGEEAYRQIVAAFGPGILRADGEIDRQKLGAIRFSDEQQRKVLNSIVGPAVLKKMLAEKEAHIRSGAKTVVLDIPLLFESGLTHWVDKVLVVYVDDDVQLRRLMARNGFTEEEALKRIRSQWPSAEKVKRADAVIDNNGNIEETRRQLVDILHQWDLLGKGGSGHHHHHH

SEQ ID NO: 603 - DNA, 633 bp, synthetic construct
  misc_feature 1..633: note = Variant of 3'O-kinase
  source 1..633: mol_type = other DNA
atggcgtttaccattggtttaacaggagggatcgcagcgggcaaatcgactgtgagtgccatgatgcgtgaactgggtctgccggtcatcgatgctgacgaggcagcacgcgccgttatgcgtccaggcgaagaaacgtatcgccagattgtagctgcgttcggtccgggcattcttcgtgccgatggcgagatcgatcgccagaaactgggtgctatccgcttttcggacgaacaacaacgtaaggtgctgaattcgattgtaggtcctgcagtcctgaagaaaatgctcgctgagaaagaagctcatatccgctcaggcgccaagacggttgtgctggatatcccgctgctgttcgaatccggattgacccattgggtcgacaaagtgctcgtggtgtacgtcgatgatgatgttcagttacgccgccttatggcacgtaacgggtttactgaagaagaagctctgaagcgcattcgttcacagtggcccagtgcggagaaagttaaacgtgcagacgctgtcatcgacaataatggcaatattgaagaaacccgccgccagctggtggacattttacaccagtgggatctgctgggtaagggtggctccggccaccatcatcaccatcac

SEQ ID NO: 604 - protein, 211 aa, synthetic construct
  REGION 1..211: note = Variant of 3'O-kinase
MAFTIGLTGGIAAGKSTVSAMMRELGLPVIDADEAARAVMRPGEETYRQIVAAFGPGILRADGEIDRQKLGAIRFSDEQQRKVLNSIVGPAVLKKMLAEKEAHIRSGAKTVVLDIPLLFESGLTHWVDKVLVVYVDDDVQLRRLMARNGFTEEEALKRIRSQWPSAEKVKRADAVIDNNGNIEETRRQLVDILHQWDLLGKGGSGHHHHHH

SEQ ID NO: 605 - DNA, 633 bp, synthetic construct
  misc_feature 1..633: note = Variant of 3'O-kinase
  source 1..633: mol_type = other DNA
atggcgtttaccattggtttaacaggagggatcgcagcgggcaaatcgactgtgagtgccatgatgcgtgaactgggtctgccggtcatcgatgctgacgaggcagcacgcgccgttatgcgtccaggcgaagaagcttatcgccagattgtagctgcgttcggtccgggcattcttcgtgccgatggcgagatcgatcgccagaaactgggtgcgatccgcttttcggacgaacaacaacgtaaggtgctgaatgcgattctgggtcctgcagtcctgaagaagatgctcgctgagaaagaagctcatatccgctcaggcgccaagacggttgtgctggatatcccgctgctgttcgaatccggattgacccattgggtcgacaaagtgctcgtggtgtacgtcgatgatgatgttcagttacgccgccttatggcacgtaacgggtttactgaagaagaagctctgaagcgcattcgttcacagtggcccagtgaagagaaagttaaacgtgcagacgctgtcatcgacaataatggcacgattgaagaaacccgccgccagctgctggccattttacaccagtgggatctgctgggtaagggtggctccggccaccatcatcaccatcac

SEQ ID NO: 606 - protein, 211 aa, synthetic construct
  REGION 1..211: note = Variant of 3'O-kinase
MAFTIGLTGGIAAGKSTVSAMMRELGLPVIDADEAARAVMRPGEEAYRQIVAAFGPGILRADGEIDRQKLGAIRFSDEQQRKVLNAILGPAVLKKMLAEKEAHIRSGAKTVVLDIPLLFESGLTHWVDKVLVVYVDDDVQLRRLMARNGFTEEEALKRIRSQWPSEEKVKRADAVIDNNGTIEETRRQLLAILHQWDLLGKGGSGHHHHHH

SEQ ID NO: 607 - DNA, 633 bp, synthetic construct
  misc_feature 1..633: note = Variant of 3'O-kinase
  source 1..633: mol_type = other DNA
atggcgtttaccattggtttaacaggagggatcgcagcgggcaaatcgactgtgagtgccatgatgcgtgaactgggtctgccggtcatcgatgctgacgaggcagcacgcgccgttatgaagccaggcgaagaaacgtatcgccagattgtagctgcgttcggtccgggcattcttcgtgccgatggcgagatcgatcgccagaaactgggtgctatccgcttttcggacgaacaacaacgtaaggtgctgaattcgattgtaggtcctgcagtcctgaagctgatgctcgctgagaaagaagctcatatccgctcaggcgccaagacggttgtgctggatatcccgctgctgttcgaatccggattgacccattgggtcgacaaagtgctcgtggtgtacgtcgatgatgatgttcagttacgccgccttatggcacgtaacgggtttactgaagaagaagctctgaagcgcattcgttcacagtggcccagtgcggagaaagttaaacgtgcagacgctgtcatcgacaataatggcacgattgaagaaacccgccgccagctgctggacattttacaccagtgggatctgctgggtaagggtggctccggccaccatcatcaccatcac

SEQ ID NO: 608 - protein, 211 aa, synthetic construct
  REGION 1..211: note = Variant of 3'O-kinase
MAFTIGLTGGIAAGKSTVSAMMRELGLPVIDADEAARAVMKPGEETYRQIVAAFGPGILRADGEIDRQKLGAIRFSDEQQRKVLNSIVGPAVLKLMLAEKEAHIRSGAKTVVLDIPLLFESGLTHWVDKVLVVYVDDDVQLRRLMARNGFTEEEALKRIRSQWPSAEKVKRADAVIDNNGTIEETRRQLLDILHQWDLLGKGGSGHHHHHH

SEQ ID NO: 609 - DNA, 633 bp, synthetic construct
  misc_feature 1..633: note = Variant of 3'O-kinase
  source 1..633: mol_type = other DNA
atggcgtttaccattggtttaacaggagggatcgcagcgggcaaatcgactgtgagtgccatgatgcgtgaactgggtctgccggtcatcgatgctgacgaggcagcacgcgccgttatgcgtccaggcgaagaagcttatcgccagattgtagctgcgttcggtccgggcattcttcgtgccgatggcgagatcgatcgccagaaactgggtcatatccgcttttcggacgaacaacaacgtaaggtgctgaatgcgattgtaggtcctgcagtcctgaagaagatgctcgctgagaaagaagctcatatccgctcaggcgccaagacggttgtgctggatatcccgctgctgttcgaatccggattgcagcattgggtcgacaaagtgctcgtggtgtacgtcgatgatgatgttcagttacgccgccttatggcacgtaacgggtttactgaagaagaagctctgaagcgcattcgttcacagtggcccagtatcgagaaagttaaacgtgcagacgctgtcatcgacaataatggcacgattgaagaaacccgccgccagctgctggccattttacaccagtgggatctgctgggtaagggtggctccggccaccatcatcaccatcac

SEQ ID NO: 610 - protein, 211 aa, synthetic construct
  REGION 1..211: note = Variant of 3'O-kinase
MAFTIGLTGGIAAGKSTVSAMMRELGLPVIDADEAARAVMRPGEEAYRQIVAAFGPGILRADGEIDRQKLGHIRFSDEQQRKVLNAIVGPAVLKKMLAEKEAHIRSGAKTVVLDIPLLFESGLQHWVDKVLVVYVDDDVQLRRLMARNGFTEEEALKRIRSQWPSIEKVKRADAVIDNNGTIEETRRQLLAILHQWDLLGKGGSGHHHHHH

SEQ ID NO: 611 - DNA, 633 bp, synthetic construct
  misc_feature 1..633: note = Variant of 3'O-kinase
  source 1..633: mol_type = other DNA
atggcgtttaccattggtttaacaggagggatcgcagcgggcaaatcgactgtgagtgccatgatgcgtgaactgggtctgccggtcatcgatgctgacgaggcagcacgcgccgttatgcgtccaggcgaagaagcttatcatcagattgtagctgcgttcggtccgggcattcttcgtgccgatggcgagatcgatcgccagaaactgggtgctatccgcttttcggacgaacaacaactgaaggtgctgaatgcgattgtaggtcctgcagtcctgaagaagatgctcgctgagaaagaagctctgatccgctcaggcgccaagacggttgtgctggatatcccgctgctgttcgaatccggattgacccattgggtcgacaaagtgctcgtggtgtacgttgatgatgatgttcagttacgccgccttatggcacgtaacgggtttactgaagaagaagctctgaagcgcattcgttcacagtggcccagtgcggagaaagttaaacgtgcagacgcttggatcgacaataatggcacgattgaagaaacccgccgccagctgctggccattttacaccagtgggatctgctgtgtaagggtggctccggccaccatcatcaccatcac

SEQ ID NO: 612 - protein, 211 aa, synthetic construct
  REGION 1..211: note = Variant of 3'O-kinase
MAFTIGLTGGIAAGKSTVSAMMRELGLPVIDADEAARAVMRPGEEAYHQIVAAFGPGILRADGEIDRQKLGAIRFSDEQQLKVLNAIVGPAVLKKMLAEKEALIRSGAKTVVLDIPLLFESGLTHWVDKVLVVYVDDDVQLRRLMARNGFTEEEALKRIRSQWPSAEKVKRADAWIDNNGTIEETRRQLLAILHQWDLLCKGGSGHHHHHH

SEQ ID NO: 613 - DNA, 633 bp, synthetic construct
  misc_feature 1..633: note = Variant of 3'O-kinase
  source 1..633: mol_type = other DNA
atggcgtttaccattggtttaacaggagggatcgcagcgggcaaatcgactgtgagtgccatgatgcgtgaactgggtctgccggtcatcgatgctgacgaggcagcacgcgccgttatgcgtccaggcgaagaagcttatcgccagattgtagctgcgttcggtccgggcattcttcgtgccgatggcgagatcgatcgccagaaactgggtgctatccgcttttcggacgaacaacaacgtaaggtgctgaatgcgattgtaggtcctgcagtcctgaagaagatgctcgctgagaaagaagctcatatccgctcaggcgccaagacggttgtgctggatatcccgctgctgttcgaatccggattgacccatttggtcgacaaagtgctcgtggtgtacgtcgatgatgatgttcagttacgccgccttatggcacgtaacgggtttactgaagaagaagctctgaagcgcattcgttcacagtggcccagtgcggagaaagttaaacgtgcagacgctgtcatcgacaataatggcacgattgaagaaacccgccgccagctgctggccattttacaccagtgggatctgctgggtaagggtggctccggccaccatcatcaccatcac

SEQ ID NO: 614 - protein, 211 aa, synthetic construct
  REGION 1..211: note = Variant of 3'O-kinase
MAFTIGLTGGIAAGKSTVSAMMRELGLPVIDADEAARAVMRPGEEAYRQIVAAFGPGILRADGEIDRQKLGAIRFSDEQQRKVLNAIVGPAVLKKMLAEKEAHIRSGAKTVVLDIPLLFESGLTHLVDKVLVVYVDDDVQLRRLMARNGFTEEEALKRIRSQWPSAEKVKRADAVIDNNGTIEETRRQLLAILHQWDLLGKGGSGHHHHHH

SEQ ID NO: 615 - DNA, 633 bp, synthetic construct
  misc_feature 1..633: note = Variant of 3'O-kinase
  source 1..633: mol_type = other DNA
atggcggtgaccattggtttaacaggagggatcgcagcgggcaaatcgactgtgagtgccatgatgcgtgaactgggtctgccggtcatcgatgctgacgaggcagcacgcgccgttatgcgtccaggcgaagaagcttatcgccagattgtagctgcgttcggtccgggcattcttcgtgccgatggcgagatcgatcgccagaaactgggtgctatccgcttttcggacgaacaacaacgtaaggtgctgaatgcgattgtaggtcctgcagtcctgaagaagatgctcgctgagaaagaagctcatatccgctcaggcgccaagacggttgtgctggatatcccgctgctgttcgaatccggattgacccattgggtcgacaaagtgctcgtggtgtacgtcgatgatgatgttcagttacgccgccttatggcacgtaacgggtttactgaagaagaagctctgaagcgcattcgttcacagtggcccagtgcggagaaagttaaacgtgcagacgctgtcatcgacaataatggcacgattgaagaaacccgccgccagctgctggccattttacaccagtgggatctgctgggtaagggtggctccggccaccatcatcaccatcac

SEQ ID NO: 616 - protein, 211 aa, synthetic construct
  REGION 1..211: note = Variant of 3'O-kinase
MAVTIGLTGGIAAGKSTVSAMMRELGLPVIDADEAARAVMRPGEEAYRQIVAAFGPGILRADGEIDRQKLGAIRFSDEQQRKVLNAIVGPAVLKKMLAEKEAHIRSGAKTVVLDIPLLFESGLTHWVDKVLVVYVDDDVQLRRLMARNGFTEEEALKRIRSQWPSAEKVKRADAVIDNNGTIEETRRQLLAILHQWDLLGKGGSGHHHHHH

SEQ ID NO: 617 - DNA, 633 bp, synthetic construct
  misc_feature 1..633: note = Variant of 3'O-kinase
  source 1..633: mol_type = other DNA
atggcgtttaccattggtttaacaggagggatcgcagcgggcaaatcgactgtgagtgccatgatgcgtgaactgggtctgccggtcatcgatgctgacgaggcagcacgcgccgttatgcgtccaggcgaagaagcttatcgccagattgtagctgcgttcggtccgggcattcttcgtgaggatggcgagatcgatcgccagaaactgggtgctatccgcttttcggacgaacaacaacgtaaggtgctgaatgcgattgtaggtcctgcagtcctgaagaagatgctcgctgagaaagaagctcatatccgctcaggcgccaagacggttgtgctggatatcccgctgctgttcgaatccggattgacccattgggtcgacaaagtgctcgtggtgtacgtcgatgatgatgttcagttacgccgccttatggcacgtaacgggtttactgaagaagaagctctgaagcgcattcgttcacagtggcccagtgcggagaaagttaaacgtgcagacgctgtcatcgacaataatggcacgattgaagaaacccgccgccagctgctggccattttacaccagtgggatctgctgggtaagggtggctccggccaccatcatcaccatcac

SEQ ID NO: 618 - protein, 211 aa, synthetic construct
  REGION 1..211: note = Variant of 3'O-kinase
MAFTIGLTGGIAAGKSTVSAMMRELGLPVIDADEAARAVMRPGEEAYRQIVAAFGPGILREDGEIDRQKLGAIRFSDEQQRKVLNAIVGPAVLKKMLAEKEAHIRSGAKTVVLDIPLLFESGLTHWVDKVLVVYVDDDVQLRRLMARNGFTEEEALKRIRSQWPSAEKVKRADAVIDNNGTIEETRRQLLAILHQWDLLGKGGSGHHHHHH

SEQ ID NO: 619 - DNA, 633 bp, synthetic construct
  misc_feature 1..633: note = Variant of 3'O-kinase
  source 1..633: mol_type = other DNA
atggcgtttaccattggtttaacaggagggatcgcagcgggcaaatcgactgtgagtgccatgatgcgtgaactgggtctgccggtcatcgatgctgacgaggcagcacgcgccgttatgcgtccaggcgaagaagcttatcgccagattgtagctgcgttcggtccgggcattcttcgtgccgatggcgagatcgatcgccagaaactgggtgctatccgcttttcggacgaacaacaacgtaaggtgctgaatgcgattgtaggtcctgcagtcctgaagaagatgctcgctgagaaagaagctcatatccgctcaggcgccaagacggttgtgctggatatcccgctgctgttcgaatccggattgacccattgggtcgacaaagtgctcgtggtgtacgtcgatgatgatgttcagttacgccgccttatggcacgtaacgggtttactgaagaagaagctctgaagcgcattcgttcacagtggcccagtgcggagaaagttaaaatggcagacgctgtcatcgacaataatggcacgattgaagaaacccgccgccagctgctggccattttacaccagtgggatctgctgggtaagggtggctccggccaccatcatcaccatcac

SEQ ID NO: 620 - protein, 211 aa, synthetic construct
  REGION 1..211: note = Variant of 3'O-kinase
MAFTIGLTGGIAAGKSTVSAMMRELGLPVIDADEAARAVMRPGEEAYRQIVAAFGPGILRADGEIDRQKLGAIRFSDEQQRKVLNAIVGPAVLKKMLAEKEAHIRSGAKTVVLDIPLLFESGLTHWVDKVLVVYVDDDVQLRRLMARNGFTEEEALKRIRSQWPSAEKVKMADAVIDNNGTIEETRRQLLAILHQWDLLGKGGSGHHHHHH

SEQ ID NO: 621 - DNA, 633 bp, synthetic construct
  misc_feature 1..633: note = Variant of 3'O-kinase
  source 1..633: mol_type = other DNA
atggcgtttaccattggtttaacaggagggatcgcagcgggcaaatcgactgtgagtgccatgatgcgtgaactgggtctgccggtcatcgatgctgacgaggcagcacgcgccgttatgcgtccaggcgaagaagcttatcgccagattgtagctgcgttcggtccgggcattcttcgtgccgatggcgagatcgatcgccagaaactgggtgctatccgcttttcggacgaacaacaacgtaaggtgctgaatgcgattgtaggtcctgcagtcctgaagaagatgctcgctgagaaagaagctcatatccgctcaggcgccaagacggttgtgctggatatcccgctgctgttcgaatccggattgacccattgtgtcgacaaagtgctcgtggtgtacgtcgatgatgatgttcagttacgccgccttatggcacgtaacgggtttactgaagaagaagctctgaagcgcattcgttcacagtggcccagtgcggagaaagttaaacgtgcagacgctgtcatcgacaataatggcacgattgaagaaacccgccgccagctgctggccattttacaccagtgggatctgctgggtaagggtggctccggccaccatcatcaccatcac

SEQ ID NO: 622 - protein, 211 aa, synthetic construct
  REGION 1..211: note = Variant of 3'O-kinase
MAFTIGLTGGIAAGKSTVSAMMRELGLPVIDADEAARAVMRPGEEAYRQIVAAFGPGILRADGEIDRQKLGAIRFSDEQQRKVLNAIVGPAVLKKMLAEKEAHIRSGAKTVVLDIPLLFESGLTHCVDKVLVVYVDDDVQLRRLMARNGFTEEEALKRIRSQWPSAEKVKRADAVIDNNGTIEETRRQLLAILHQWDLLGKGGSGHHHHHH

SEQ ID NO: 623 - DNA, 633 bp, synthetic construct
  misc_feature 1..633: note = Variant of 3'O-kinase
  source 1..633: mol_type = other DNA
atggcgtttaccattggtttaacaggagggatcgcagcgggcaaatcgactgtgagtgccatgatgcgtgaactgggtctgccggtcatcgatgctgacgaggcagcacgcgccgttatgcgtccaggcgaagaagcttatcgccagattgtagctgcgttcggtccgggcattcttcgtgccgatggcgagatcgatcgccagaaactgggtgctatccgcttttcggacgaacaacaacgtaaggtgctgaatgcgattgtaggtcctgcagtcctgaagaagatgctcgctgagaaagaagctcatatcaagtcaggcgccaagacggttgtgctggatatcccgctgctgttcgaatccggattgacccattgggtcgacaaagtgctcgtggtgtacgtcgatgatgatgttcagttacgccgccttatggcacgtaacgggtttactgaagaagaagctctgaagcgcattcgttcacagtggcccagtgcggagaaagttaaacgtgcagacgctgtcatcgacaataatggcacgattgaagaaacccgccgccagctgctggccattttacaccagtgggatctgctgggtaagggtggctccggccaccatcatcaccatcac

SEQ ID NO: 624 - protein, 211 aa, synthetic construct
  REGION 1..211: note = Variant of 3'O-kinase
MAFTIGLTGGIAAGKSTVSAMMRELGLPVIDADEAARAVMRPGEEAYRQIVAAFGPGILRADGEIDRQKLGAIRFSDEQQRKVLNAIVGPAVLKKMLAEKEAHIKSGAKTVVLDIPLLFESGLTHWVDKVLVVYVDDDVQLRRLMARNGFTEEEALKRIRSQWPSAEKVKRADAVIDNNGTIEETRRQLLAILHQWDLLGKGGSGHHHHHH

SEQ ID NO: 625 - DNA, 633 bp, synthetic construct
  misc_feature 1..633: note = Variant of 3'O-kinase
  source 1..633: mol_type = other DNA
atggcgtttaccattggtttaacaggagggatcgcagcgggcaaatcgactgtgagtgccatgatgcgtgaactgggtctgccggtcatcgatgctgacgaggcagcacgcgccgttatgcgtccaggcgaagaagcttatcgccagattgtagctgcgttcggtccgggcattcttcgtgccgatggcgagatcgatcgccagaaactgggtgctatccgcttttcggacgaacaacaacgtaaggtgctgaatgcgattgtaggtcctgcagtcctgaagaagatgctcgctgagaaagaagctcatatccgctcaggcgccaagacggttgtgctggatatcccgctgctgttcgaatccggattgacccattgggtcgacaaagtgctcgtggtgtacgtcgatgatgatgttcagttaaagcgccttatggcacgtaacgggtttactgaagaagaagctctgaagcgcattcgttcacagtggcccagtgcggagaaagttaaacgtgcagacgctgtcatcgacaataatggcacgattgaagaaacccgccgccagctgctggccattttacaccagtgggatctgctgggtaagggtggctccggccaccatcatcaccatcac

SEQ ID NO: 626 - protein, 211 aa, synthetic construct
  REGION 1..211: note = Variant of 3'O-kinase
MAFTIGLTGGIAAGKSTVSAMMRELGLPVIDADEAARAVMRPGEEAYRQIVAAFGPGILRADGEIDRQKLGAIRFSDEQQRKVLNAIVGPAVLKKMLAEKEAHIRSGAKTVVLDIPLLFESGLTHWVDKVLVVYVDDDVQLKRLMARNGFTEEEALKRIRSQWPSAEKVKRADAVIDNNGTIEETRRQLLAILHQWDLLGKGGSGHHHHHH

SEQ ID NO: 627 - DNA, 633 bp, synthetic construct
  misc_feature 1..633: note = Variant of 3'O-kinase
  source 1..633: mol_type = other DNA
atggcgtttaccattggtttaacaggagggatcgcagcgggcaaatcgactgtgagtgccatgatgcgtgaactgggtctgccggtcatcgatgctgacgaggcagcacgcgccgttatgcgtccaggcgaagaagcttatcgccagattgtagctgcgttcggtccgggcattcttcgtgccgatggcgagatcgatcgccagaaactgggtgctatccgcttttcggacgaacaacaacgtaaggtgctgaatgcgattgtaggtcctgcagtcctgaagaagatgctcgctgagaaagaagctcatatccgctcaggcgccaagacggttgtgctggatatcccgctgctgttcgaatccggattgacccatgtggtcgacaaagtgctcgtggtgtacgtcgatgatgatgttcagttacgccgccttatggcacgtaacgggtttactgaagaagaagctctgaagcgcattcgttcacagtggcccagtgcggagaaagttaaacgtgcagacgctgtcatcgacaataatggcacgattgaagaaacccgccgccagctgctggccattttacaccagtgggatctgctgggtaagggtggctccggccaccatcatcaccatcac

SEQ ID NO: 628 - protein, 211 aa, synthetic construct
  REGION 1..211: note = Variant of 3'O-kinase
MAFTIGLTGGIAAGKSTVSAMMRELGLPVIDADEAARAVMRPGEEAYRQIVAAFGPGILRADGEIDRQKLGAIRFSDEQQRKVLNAIVGPAVLKKMLAEKEAHIRSGAKTVVLDIPLLFESGLTHVVDKVLVVYVDDDVQLRRLMARNGFTEEEALKRIRSQWPSAEKVKRADAVIDNNGTIEETRRQLLAILHQWDLLGKGGSGHHHHHH

SEQ ID NO: 629 - DNA, 633 bp, synthetic construct
  misc_feature 1..633: note = Variant of 3'O-kinase
  source 1..633: mol_type = other DNA
atggcgtttaccattggtttaacaggagggatcgcagcgggcaaatcgactgtgagtgccatgatgcgtgaactgggtctgccggtcatcgatgctgacgaggcagcacgcgccgttatgcgtccaggcgaagaagcttatcgccagattgtagctgcgttcggtccgggcattcttcgtgccgatggcgagatcgatcgccagaaactgggtgctatccgcttttcggacgaacaacaacgtaaggtgctgaatgcgattgtaggtcctgcagtcctgaagaagatgctcgctgagaaagaagctcatatccgctcaggcgccaagacggttgtgctggatatcccgctgctgttcgaatccggattgacccagtgggtcgacaaagtgctcgtggtgtacgtcgatgatgatgttcagttacgccgccttatggcacgtaacgggtttactgaagaagaagctctgaagcgcattcgttcacagtggcccagtgcggagaaagttaaacgtgcagacgctgtcatcgacaataatggcacgattgaagaaacccgccgccagctgctggccattttacaccagtgggatctgctgggtaagggtggctccggccaccatcatcaccatcac

SEQ ID NO: 630 - protein, 211 aa, synthetic construct
  REGION 1..211: note = Variant of 3'O-kinase
MAFTIGLTGGIAAGKSTVSAMMRELGLPVIDADEAARAVMRPGEEAYRQIVAAFGPGILRADGEIDRQKLGAIRFSDEQQRKVLNAIVGPAVLKKMLAEKEAHIRSGAKTVVLDIPLLFESGLTQWVDKVLVVYVDDDVQLRRLMARNGFTEEEALKRIRSQWPSAEKVKRADAVIDNNGTIEETRRQLLAILHQWDLLGKGGSGHHHHHH

SEQ ID NO: 631 - DNA, 633 bp, synthetic construct
  misc_feature 1..633: note = Variant of 3'O-kinase
  source 1..633: mol_type = other DNA
atggcgtttaccattggtttaacaggagggatcgcagcgggcaaatcgactgtgagtgccatgatgcgtgaactgggtctgccggtcatcgatgctgacgaggcaaggcgcgccgttatgcgtccaggcgaagaagcttatcgccagattgtagctgcgttcggtccgggcattcttcgtgccgatggcgagatcgatcgccagaaactgggtgctatccgcttttcggacgaacaacaacgtaaggtgctgaatgcgattgtaggtcctgcagtcctgaagaagatgctcgctgagaaagaagctcatatccgctcaggcgccaagacggttgtgctggatatcccgctgctgttcgaatccggattgacccattgggtcgacaaagtgctcgtggtgtacgtcgatgatgatgttcagttacgccgccttatggcacgtaacgggtttactgaagaagaagctctgaagcgcattcgttcacagtggcccagtgcggagaaagttaaacgtgcagacgctgtcatcgacaataatggcacgattgaagaaacccgccgccagctgctggccattttacaccagtgggatctgctgggtaagggtggctccggccaccatcatcaccatcac

SEQ ID NO: 632 - protein, 211 aa, synthetic construct
  REGION 1..211: note = Variant of 3'O-kinase
MAFTIGLTGGIAAGKSTVSAMMRELGLPVIDADEARRAVMRPGEEAYRQIVAAFGPGILRADGEIDRQKLGAIRFSDEQQRKVLNAIVGPAVLKKMLAEKEAHIRSGAKTVVLDIPLLFESGLTHWVDKVLVVYVDDDVQLRRLMARNGFTEEEALKRIRSQWPSAEKVKRADAVIDNNGTIEETRRQLLAILHQWDLLGKGGSGHHHHHH

SEQ ID NO: 633 - DNA, 633 bp, synthetic construct
  misc_feature 1..633: note = Variant of 3'O-kinase
  source 1..633: mol_type = other DNA
atggcgtttaccattggtttaacaggagggatcgcagcgggcaaatcgactgtgagtgccatgatgcgtgaactgggtctgccggtcatcgatgctgacgaggcagcacgcgccgttatgcgtccaggcgaagaagcttatcgccagattgtagctgcgttcggtccgggcattcttcgtgccgatggcgagatcgatcgccagaaactgggtgctatccgcttttcggacgaacaacaacgtaaggtgctgaatgcgattgtaggtcctgcagtcctgaagaagatgctcgctgagaaagaagctcatatccgctcaggcgccaagacggttgtgctggatatcccgctgctgttcgaatccggattgacccatgcggtcgacaaagtgctcgtggtgtacgtcgatgatgatgttcagttacgccgccttatggcacgtaacgggtttactgaagaagaagctctgaagcgcattcgttcacagtggcccagtgcggagaaagttaaacgtgcagacgctgtcatcgacaataatggcacgattgaagaaacccgccgccagctgctggccattttacaccagtgggatctgctgggtaagggtggctccggccaccatcatcaccatcac

SEQ ID NO: 634 - protein, 211 aa, synthetic construct
  REGION 1..211: note = Variant of 3'O-kinase
MAFTIGLTGGIAAGKSTVSAMMRELGLPVIDADEAARAVMRPGEEAYRQIVAAFGPGILRADGEIDRQKLGAIRFSDEQQRKVLNAIVGPAVLKKMLAEKEAHIRSGAKTVVLDIPLLFESGLTHAVDKVLVVYVDDDVQLRRLMARNGFTEEEALKRIRSQWPSAEKVKRADAVIDNNGTIEETRRQLLAILHQWDLLGKGGSGHHHHHH

SEQ ID NO: 635 - DNA, 633 bp, synthetic construct
  misc_feature 1..633: note = Variant of 3'O-kinase
  source 1..633: mol_type = other DNA
atggcgtttaccattggtttaacaggagggatcgcagcgggcaaatcgactgtgagtgccatgatgcgtgaactgggtctgccggtcatcgatgctgacgaggcagcacgcgccgttatgcgtccaggcgaagaagcttatcgccagatggtagctgcgttcggtccgggcattcttcgtgccgatggcgagatcgatcgccagaaactgggtgctatccgcttttcggacgaacaacaacgtaaggtgctgaatgcgattgtaggtcctgcagtcctgaagaagatgctcgctgagaaagaagctcatatccgctcaggcgccaagacggttgtgctggatatcccgctgctgttcgaatccggattgacccattgggtcgacaaagtgctcgtggtgtacgtcgatgatgatgttcagttacgccgccttatggcacgtaacgggtttactgaagaagaagctctgaagcgcattcgttcacagtggcccagtgcggagaaagttaaacgtgcagacgctgtcatcgacaataatggcacgattgaagaaacccgccgccagctgctggccattttacaccagtgggatctgctgggtaagggtggctccggccaccatcatcaccatcac

SEQ ID NO: 636 - protein, 211 aa, synthetic construct
  REGION 1..211: note = Variant of 3'O-kinase
MAFTIGLTGGIAAGKSTVSAMMRELGLPVIDADEAARAVMRPGEEAYRQMVAAFGPGILRADGEIDRQKLGAIRFSDEQQRKVLNAIVGPAVLKKMLAEKEAHIRSGAKTVVLDIPLLFESGLTHWVDKVLVVYVDDDVQLRRLMARNGFTEEEALKRIRSQWPSAEKVKRADAVIDNNGTIEETRRQLLAILHQWDLLGKGGSGHHHHHH

SEQ ID NO: 637 - DNA, 633 bp, synthetic construct
  misc_feature 1..633: note = Variant of 3'O-kinase
  source 1..633: mol_type = other DNA
atggcgtttaccattggtttaacaggagggatcgcagcgggcaaatcgactgtgagtgccatgatgcgtgaactgggtctgccggtcatcgatgctgacgaggcagcacgcgccgttatgcgtccaggcgaagaagcttatcgccagattgtagctgcgttcggtccgggcattcttcgtgccgatggcgagatcgatcgccagaaactgggtgctatccgcttttcggacgaacaacaacgtaaggtgctgcgggcgattgtaggtcctgcagtcctgaagaagatgctcgctgagaaagaagctcatatccgctcaggcgccaagacggttgtgctggatatcccgctgctgttcgaatccggattgacccattgggtcgacaaagtgctcgtggtgtacgtcgatgatgatgttcagttacgccgccttatggcacgtaacgggtttactgaagaagaagctctgaagcgcattcgttcacagtggcccagtgcggagaaagttaaacgtgcagacgctgtcatcgacaataatggcacgattgaagaaacccgccgccagctgctggccattttacaccagtgggatctgctgggtaagggtggctccggccaccatcatcaccatcac

SEQ ID NO: 638 - protein, 211 aa, synthetic construct
  REGION 1..211: note = Variant of 3'O-kinase
MAFTIGLTGGIAAGKSTVSAMMRELGLPVIDADEAARAVMRPGEEAYRQIVAAFGPGILRADGEIDRQKLGAIRFSDEQQRKVLRAIVGPAVLKKMLAEKEAHIRSGAKTVVLDIPLLFESGLTHWVDKVLVVYVDDDVQLRRLMARNGFTEEEALKRIRSQWPSAEKVKRADAVIDNNGTIEETRRQLLAILHQWDLLGKGGSGHHHHHH

SEQ ID NO: 639 - DNA, 633 bp, synthetic construct
  misc_feature 1..633: note = Variant of 3'O-kinase
  source 1..633: mol_type = other DNA
atggcgtttaccattggtttaacaggagggatcgcagcgggcaaatcgactgtgagtgccatgatgcgtgaactgggtctgccggtcatcgatgctgacgaggcagcacgcgccgttatgcgtccaggcgaagaagcttatcgccagattgtagctgcgttcggtccgggcattcttcgtgccgatggcgagatcgatcgccagaaactgggtgctatccgcttttcggacgaacaacaacgtaaggtgctgcttgcgattgtaggtcctgcagtcctgaagaagatgctcgctgagaaagaagctcatatccgctcaggcgccaagacggttgtgctggatatcccgctgctgttcgaatccggattgacccattgggtcgacaaagtgctcgtggtgtacgtcgatgatgatgttcagttacgccgccttatggcacgtaacgggtttactgaagaagaagctctgaagcgcattcgttcacagtggcccagtgcggagaaagttaaacgtgcagacgctgtcatcgacaataatggcacgattgaagaaacccgccgccagctgctggccattttacaccagtgggatctgctgggtaagggtggctccggccaccatcatcaccatcac

SEQ ID NO: 640 - protein, 211 aa, synthetic construct
  REGION 1..211: note = Variant of 3'O-kinase
MAFTIGLTGGIAAGKSTVSAMMRELGLPVIDADEAARAVMRPGEEAYRQIVAAFGPGILRADGEIDRQKLGAIRFSDEQQRKVLLAIVGPAVLKKMLAEKEAHIRSGAKTVVLDIPLLFESGLTHWVDKVLVVYVDDDVQLRRLMARNGFTEEEALKRIRSQWPSAEKVKRADAVIDNNGTIEETRRQLLAILHQWDLLGKGGSGHHHHHH

SEQ ID NO: 641 - DNA, 633 bp, synthetic construct
  misc_feature 1..633: note = Variant of 3'O-kinase
  source 1..633: mol_type = other DNA
atggcgtttaccattggtttaacaggagggatcgcagcgggcaaatcgactgtgagtgccatgatgcgtgaactgggtctgccggtcatcgatgctgacgaggcagcacgcgccgttatgcgtccaggcgaagaagcttatcgccagattgtagctgcgttcggtccgggcattcttcgtgccgatggcgagatcgatcgccagaaactgggtgctatccgcttttcggacgctcaacaacgtaaggtgctgaatgcgattgtaggtcctgcagtcctgaagaagatgctcgctgagaaagaagctcatatccgctcaggcgccaagacggttgtgctggatatcccgctgctgttcgaatccggattgacccattgggtcgacaaagtgctcgtggtgtacgtcgatgatgatgttcagttacgccgccttatggcacgtaacgggtttactgaagaagaagctctgaagcgcattcgttcacagtggcccagtgcggagaaagttaaacgtgcagacgctgtcatcgacaataatggcacgattgaagaaacccgccgccagctgctggccattttacaccagtgggatctgctgggtaagggtggctccggccaccatcatcaccatcac

SEQ ID NO: 642 - protein, 211 aa, synthetic construct
  REGION 1..211: note = Variant of 3'O-kinase
MAFTIGLTGGIAAGKSTVSAMMRELGLPVIDADEAARAVMRPGEEAYRQIVAAFGPGILRADGEIDRQKLGAIRFSDAQQRKVLNAIVGPAVLKKMLAEKEAHIRSGAKTVVLDIPLLFESGLTHWVDKVLVVYVDDDVQLRRLMARNGFTEEEALKRIRSQWPSAEKVKRADAVIDNNGTIEETRRQLLAILHQWDLLGKGGSGHHHHHH

SEQ ID NO: 643 - DNA, 633 bp, synthetic construct
  misc_feature 1..633: note = Variant of 3'O-kinase
  source 1..633: mol_type = other DNA
atggcgtttaccattggtttaacaggagggatcgcagcgggcaaatcgactgtgagtgccatgatgcgtgaactgggtctgccggtcatcgatgctgacgaggcagcacgcgccgttatgcgtccaggcgaagaagcttatcgccagattgtagctgcgttcggtccgggcattcttcgtgccgatggcgagatcgatcgccagaaactgggtgctatccgcttttcggacgaacaacaacgtaaggtgctgaatgcgattgtaggtcctgcagtcctgaagaagatgctcgctgagaaagaagctcatatccgctcaggcgccaagacggttgtgctggatatcccgctgctgttcgaatccgcgttgacccattgggtcgacaaagtgctcgtggtgtacgtcgatgatgatgttcagttacgccgccttatggcacgtaacgggtttactgaagaagaagctctgaagcgcattcgttcacagtggcccagtgcggagaaagttaaacgtgcagacgctgtcatcgacaataatggcacgattgaagaaacccgccgccagctgctggccattttacaccagtgggatctgctgggtaagggtggctccggccaccatcatcaccatcac

SEQ ID NO: 644 - protein, 211 aa, synthetic construct
  REGION 1..211: note = Variant of 3'O-kinase
MAFTIGLTGGIAAGKSTVSAMMRELGLPVIDADEAARAVMRPGEEAYRQIVAAFGPGILRADGEIDRQKLGAIRFSDEQQRKVLNAIVGPAVLKKMLAEKEAHIRSGAKTVVLDIPLLFESALTHWVDKVLVVYVDDDVQLRRLMARNGFTEEEALKRIRSQWPSAEKVKRADAVIDNNGTIEETRRQLLAILHQWDLLGKGGSGHHHHHH

SEQ ID NO: 645 - DNA, 633 bp, synthetic construct
  misc_feature 1..633: note = Variant of 3'O-kinase
  source 1..633: mol_type = other DNA
atggcgtttaccattggtttaacaggagggatcgcagcgggcaaatcgactgtgagtgccatgatgcgtgaactgggtctgccggtcatcgatgctgacgaggcagcacgcgccgttatgcgtccaggcgaagaagcttatcgccagattgtagctgcgttcggtccgggcattcttcgtgccgatggcgagatcgatcgccagaaactgggtgctatccgcttttcggacgaacaacaacgtaaggtgctgaatgcgattgtaggtcctgcagtcctgaagaagatgctcgctgagaaagaagctcatatccgctcaggcgccaagacggttgtgctggatatcccgctgctgttcgaatccggattgacccattgggtcgacaaagtgctcgtggtgtacgtcgatgatgatgttcagttacgccgccttatggcacgtaacgggtttactgaagaagaagctctgaagcgcattcgttcacagtggcccagtgcggagaaagttaaacgtgcagacgctgtcatcgacaataatggcacgattgaagaaacccgccgccagctgctggccattttacaccagtgggatctgctgggtaagggttgttccggccaccatcatcaccatcac

SEQ ID NO: 646 - protein, 211 aa, synthetic construct
  REGION 1..211: note = Variant of 3'O-kinase
MAFTIGLTGGIAAGKSTVSAMMRELGLPVIDADEAARAVMRPGEEAYRQIVAAFGPGILRADGEIDRQKLGAIRFSDEQQRKVLNAIVGPAVLKKMLAEKEAHIRSGAKTVVLDIPLLFESGLTHWVDKVLVVYVDDDVQLRRLMARNGFTEEEALKRIRSQWPSAEKVKRADAVIDNNGTIEETRRQLLAILHQWDLLGKGCSGHHHHHH

SEQ ID NO: 647 - DNA, 633 bp, synthetic construct
  misc_feature 1..633: note = Variant of 3'O-kinase
  source 1..633: mol_type = other DNA
atggcgtttaccattggtttaacaggagggatcgcagcgggcaaatcgactgtgagtgccatgatgcgtgaactgggtctgccggtcatcgatgctgacgaggcagcacgcgccgttatgcgtccaggcgaagaagcttatcgccagattgtagctgcgttcggtccgggcattcttcgtgccgatggcgagatcgatcgccagaaactgggtgctatccgcttttcggacgaacaacaacgtaaggtgctgaatgcgattgtaggtcctgcagtcctgaagaagatgctcgctgagtgggaagctcatatccgctcaggcgccaagacggttgtgctggatatcccgctgctgttcgaatccggattgacccattgggtcgacaaagtgctcgtggtgtacgtcgatgatgatgttcagttacgccgccttatggcacgtaacgggtttactgaagaagaagctctgaagcgcattcgttcacagtggcccagtgcggagaaagttaaacgtgcagacgctgtcatcgacaataatggcacgattgaagaaacccgccgccagctgctggccattttacaccagtgggatctgctgggtaagggtggctccggccaccatcatcaccatcac

SEQ ID NO: 648 - protein, 211 aa, synthetic construct
  REGION 1..211: note = Variant of 3'O-kinase
MAFTIGLTGGIAAGKSTVSAMMRELGLPVIDADEAARAVMRPGEEAYRQIVAAFGPGILRADGEIDRQKLGAIRFSDEQQRKVLNAIVGPAVLKKMLAEWEAHIRSGAKTVVLDIPLLFESGLTHWVDKVLVVYVDDDVQLRRLMARNGFTEEEALKRIRSQWPSAEKVKRADAVIDNNGTIEETRRQLLAILHQWDLLGKGGSGHHHHHH

SEQ ID NO: 649 - DNA, 633 bp, synthetic construct
  misc_feature 1..633: note = Variant of 3'O-kinase
  source 1..633: mol_type = other DNA
atggcgtttaccattggtttaacaggagggatcgcagcgggcaaatcgactgtgagtgccatgatgcgtgaactgggtctgccggtcatcgatgctgacgaggcagcacgcgccgttatgcgtccaggcgaagaagcttatcgccagattgtagctgcgttcggtccgggcattcttcgtgccgatggcgagatcgatcgccagaaactgggtgctatccgcttttcggacgaacaacaacgtaaggtgctggcggcgattgtaggtcctgcagtcctgaagaagatgctcgctgagaaagaagctcatatccgctcaggcgccaagacggttgtgctggatatcccgctgctgttcgaatccggattgacccattgggtcgacaaagtgctcgtggtgtacgtcgatgatgatgttcagttacgccgccttatggcacgtaacgggtttactgaagaagaagctctgaagcgcattcgttcacagtggcccagtgcggagaaagttaaacgtgcagacgctgtcatcgacaataatggcacgattgaagaaacccgccgccagctgctggccattttacaccagtgggatctgctgggtaagggtggctccggccaccatcatcaccatcac

SEQ ID NO: 650 - protein, 211 aa, synthetic construct
  REGION 1..211: note = Variant of 3'O-kinase
MAFTIGLTGGIAAGKSTVSAMMRELGLPVIDADEAARAVMRPGEEAYRQIVAAFGPGILRADGEIDRQKLGAIRFSDEQQRKVLAAIVGPAVLKKMLAEKEAHIRSGAKTVVLDIPLLFESGLTHWVDKVLVVYVDDDVQLRRLMARNGFTEEEALKRIRSQWPSAEKVKRADAVIDNNGTIEETRRQLLAILHQWDLLGKGGSGHHHHHH

SEQ ID NO: 651 - DNA, 633 bp, synthetic construct
  misc_feature 1..633: note = Variant of 3'O-kinase
  source 1..633: mol_type = other DNA
atggcgtttaccattggtttaacaggagggatcgcagcgggcaaatcgactgtgagtgccatgatgcgtgaactgggtctgccggtcatcgatgctgacgaggcagcacgcgccgttatgcgtccaggcgaagaagcttatcgccagattgtagctgcgttcggtccgggcattcttcgtgccgatggcgagatcgatcgccagaaactgggtgctatccgcttttcggacgaacaacaacgtaaggtgctgaatgcgattgtaggtcctgcagtcctgaagaagatgctcgctgagaaagaagctcatatccgctcaggcgccaagacggttgtgctggatatcccgctgctgttcgaatccggattgacccattgggtcgacaaagtgctcgtggtgtacgtcgatgatgatgttcagttacgccgccttatggcacgtaacgggtttactgaagaagaagctctgaagcgcattcgttcacagtggcccagtgcggagaaagttaaacgtgcagacgctgtcatcgacaataatggcacgattgaagaaacccgccgccagctgctgtgtattttacaccagtgggatctgctgggtaagggtggctccggccaccatcatcaccatcac

SEQ ID NO: 652 - protein, 211 aa, synthetic construct
  REGION 1..211: note = Variant of 3'O-kinase
MAFTIGLTGGIAAGKSTVSAMMRELGLPVIDADEAARAVMRPGEEAYRQIVAAFGPGILRADGEIDRQKLGAIRFSDEQQRKVLNAIVGPAVLKKMLAEKEAHIRSGAKTVVLDIPLLFESGLTHWVDKVLVVYVDDDVQLRRLMARNGFTEEEALKRIRSQWPSAEKVKRADAVIDNNGTIEETRRQLLCILHQWDLLGKGGSGHHHHHH

SEQ ID NO: 653 - DNA, 633 bp, synthetic construct
  misc_feature 1..633: note = Variant of 3'O-kinase
  source 1..633: mol_type = other DNA
atggcgtgtaccattggtttaacaggagggatcgcagcgggcaaatcgactgtgagtgccatgatgcgtgaactgggtctgccggtcatcgatgctgacgaggcagcacgcgccgttatgcgtccaggcgaagaagcttatcgccagattgtagctgcgttcggtccgggcattcttcgtgccgatggcgagatcgatcgccagaaactgggtgctatccgcttttcggacgaacaacaacgtaaggtgctgaatgcgattgtaggtcctgcagtcctgaagaagatgctcgctgagaaagaagctcatatccgctcaggcgccaagacggttgtgctggatatcccgctgctgttcgaatccggattgacccattgggtcgacaaagtgctcgtggtgtacgtcgatgatgatgttcagttacgccgccttatggcacgtaacgggtttactgaagaagaagctctgaagcgcattcgttcacagtggcccagtgcggagaaagttaaacgtgcagacgctgtcatcgacaataatggcacgattgaagaaacccgccgccagctgctggccattttacaccagtgggatctgctgggtaagggtggctccggccaccatcatcaccatcac

SEQ ID NO: 654 - protein, 211 aa, synthetic construct
  REGION 1..211: note = Variant of 3'O-kinase
MACTIGLTGGIAAGKSTVSAMMRELGLPVIDADEAARAVMRPGEEAYRQIVAAFGPGILRADGEIDRQKLGAIRFSDEQQRKVLNAIVGPAVLKKMLAEKEAHIRSGAKTVVLDIPLLFESGLTHWVDKVLVVYVDDDVQLRRLMARNGFTEEEALKRIRSQWPSAEKVKRADAVIDNNGTIEETRRQLLAILHQWDLLGKGGSGHHHHHH

SEQ ID NO: 655 - DNA, 633 bp, synthetic construct
  misc_feature 1..633: note = Variant of 3'O-kinase
  source 1..633: mol_type = other DNA
atggcgtttaccattggtttaacaggagggatcgcagcgggcaaatcgactgtgagtgccatgatgcgtgaactgggtctgccggtcatcgatgctgacgaggcagcacgcgccgttatgcgtccaggcgaagaagcttatcgccagattgtagctgcgttcggtccgggcattcttcgtgccgatggcgagatcgatcgccagaaactgggtgctatccgcttttcggacgaacaacaacgtaaggtgctgaatgcgattgtaggtcctgcagtcctgaagaagatgctcgctgagaaagaagctcatatccgctcaggcgccaagacggttgtgctggatatcccgctgctgttcgaatccggattgacccattgggtcgacaaagtgctcgtggtgtacgtcgatgatgatgttcagttacgccgccttatggcacgtaacgggtttactgaagaagaagctctgaagcgcattcgttcacagtggcccagtgcggagaaagttaaacgtgcagacgctgtcatcgacaataatggcacgattgaagaaacccgccgccagctgctggccattttacaccagtgggatctgctgggtaagggtggcgcgggccaccatcatcaccatcac

SEQ ID NO: 656 - protein, 211 aa, synthetic construct
  REGION 1..211: note = Variant of 3'O-kinase
MAFTIGLTGGIAAGKSTVSAMMRELGLPVIDADEAARAVMRPGEEAYRQIVAAFGPGILRADGEIDRQKLGAIRFSDEQQRKVLNAIVGPAVLKKMLAEKEAHIRSGAKTVVLDIPLLFESGLTHWVDKVLVVYVDDDVQLRRLMARNGFTEEEALKRIRSQWPSAEKVKRADAVIDNNGTIEETRRQLLAILHQWDLLGKGGAGHHHHHH

SEQ ID NO: 657 - DNA, 633 bp, synthetic construct
  misc_feature 1..633: note = Variant of 3'O-kinase
  source 1..633: mol_type = other DNA
atggcgtttaccattggtttaacaggagggatcgcagcgggcaaatcgactgtgagtgccatgatgcgtgaactgggtctgccggtcatcgatgctgacgaggcagcacgcgccgttatgcgtccaggcgaagaagcttatcgccagattgtagctgcgttcggtccgggcattcttcgtgccgatggcgagatcgatcgccagaaactgggtgctatccgcttttcggacgaacaacaacgtaaggtgctgaatgcgattgtaggtcctgcagtcctgaagaagatggcggctgagaaagaagctcatatccgctcaggcgccaagacggttgtgctggatatcccgctgctgttcgaatccggattgacccattgggtcgacaaagtgctcgtggtgtacgtcgatgatgatgttcagttacgccgccttatggcacgtaacgggtttactgaagaagaagctctgaagcgcattcgttcacagtggcccagtgcggagaaagttaaacgtgcagacgctgtcatcgacaataatggcacgattgaagaaacccgccgccagctgctggccattttacaccagtgggatctgctgggtaagggtggctccggccaccatcatcaccatcac

SEQ ID NO: 658 - protein, 211 aa, synthetic construct
  REGION 1..211: note = Variant of 3'O-kinase
MAFTIGLTGGIAAGKSTVSAMMRELGLPVIDADEAARAVMRPGEEAYRQIVAAFGPGILRADGEIDRQKLGAIRFSDEQQRKVLNAIVGPAVLKKMAAEKEAHIRSGAKTVVLDIPLLFESGLTHWVDKVLVVYVDDDVQLRRLMARNGFTEEEALKRIRSQWPSAEKVKRADAVIDNNGTIEETRRQLLAILHQWDLLGKGGSGHHHHHH

SEQ ID NO: 659 - DNA, 633 bp, synthetic construct
  misc_feature 1..633: note = Variant of 3'O-kinase
  source 1..633: mol_type = other DNA
atggcgtttaccattggtttaacaggagggatcgcagcgggcaaatcgactgtgagtgccatgatgcgtgaactgggtctgccggtcatcgatggggacgaggcagcacgcgccgttatgcgtccaggcgaagaagcttatcgccagattgtagctgcgttcggtccgggcattcttcgtgccgatggcgagatcgatcgccagaaactgggtgctatccgcttttcggacgaacaacaacgtaaggtgctgaatgcgattgtaggtcctgcagtcctgaagaagatgctcgctgagaaagaagctcatatccgctcaggcgccaagacggttgtgctggatatcccgctgctgttcgaatccggattgacccattgggtcgacaaagtgctcgtggtgtacgtcgatgatgatgttcagttacgccgccttatggcacgtaacgggtttactgaagaagaagctctgaagcgcattcgttcacagtggcccagtgcggagaaagttaaacgtgcagacgctgtcatcgacaataatggcacgattgaagaaacccgccgccagctgctggccattttacaccagtgggatctgctgggtaagggtggctccggccaccatcatcaccatcac

SEQ ID NO: 660 - protein, 211 aa, synthetic construct
  REGION 1..211: note = Variant of 3'O-kinase
MAFTIGLTGGIAAGKSTVSAMMRELGLPVIDGDEAARAVMRPGEEAYRQIVAAFGPGILRADGEIDRQKLGAIRFSDEQQRKVLNAIVGPAVLKKMLAEKEAHIRSGAKTVVLDIPLLFESGLTHWVDKVLVVYVDDDVQLRRLMARNGFTEEEALKRIRSQWPSAEKVKRADAVIDNNGTIEETRRQLLAILHQWDLLGKGGSGHHHHHH

SEQ ID NO: 661 - DNA, 633 bp, synthetic construct
  misc_feature 1..633: note = Variant of 3'O-kinase
  source 1..633: mol_type = other DNA
atggcggataccattggtttaacaggagggatcgcagcgggcaaatcgactgtgagtgccatgatgcgtgaactgggtctgccggtcatcgatgctgacgaggcagcacgcgccgttatgcgtccaggcgaagaagcttatcgccagattgtagctgcgttcggtccgggcattcttcgtgccgatggcgagatcgatcgccagaaactgggtgctatccgcttttcggacgaacaacaacgtaaggtgctgaatgcgattgtaggtcctgcagtcctgaagaagatgctcgctgagaaagaagctcatatccgctcaggcgccaagacggttgtgctggatatcccgctgctgttcgaatccggattgacccattgggtcgacaaagtgctcgtggtgtacgtcgatgatgatgttcagttacgccgccttatggcacgtaacgggtttactgaagaagaagctctgaagcgcattcgttcacagtggcccagtgcggagaaagttaaacgtgcagacgctgtcatcgacaataatggcacgattgaagaaacccgccgccagctgctggccattttacaccagtgggatctgctgggtaagggtggctccggccaccatcatcaccatcac

SEQ ID NO: 662 - protein, 211 aa, synthetic construct
  REGION 1..211: note = Variant of 3'O-kinase
MADTIGLTGGIAAGKSTVSAMMRELGLPVIDADEAARAVMRPGEEAYRQIVAAFGPGILRADGEIDRQKLGAIRFSDEQQRKVLNAIVGPAVLKKMLAEKEAHIRSGAKTVVLDIPLLFESGLTHWVDKVLVVYVDDDVQLRRLMARNGFTEEEALKRIRSQWPSAEKVKRADAVIDNNGTIEETRRQLLAILHQWDLLGKGGSGHHHHHH

SEQ ID NO: 663 - DNA, 633 bp, synthetic construct
  misc_feature 1..633: note = Variant of 3'O-kinase
  source 1..633: mol_type = other DNA
atggcgtttaccattggtttaacaggagggatcgcagcgggcaaatcgactgtgagtgccatgatgcgtgaactgggtctgccggtcatcgatgctgacgaggcagcacgcgccgttatgcgtccaggcgaagaagcttatcgccagattgtagctgcgttcggtccgggcctgcttcgtgccgatggcgagatcgatcgccagaaactgggtgctatccgcttttcggacgaacaacaacgtaaggtgctgaatgcgattgtaggtcctgcagtcctgaagaagatgctcgctgagaaagaagctcatatccgctcaggcgccaagacggttgtgctggatatcccgctgctgttcgaatccggattgacccattgggtcgacaaagtgctcgtggtgtacgtcgatgatgatgttcagttacgccgccttatggcacgtaacgggtttactgaagaagaagctctgaagcgcattcgttcacagtggcccagtgcggagaaagttaaacgtgcagacgctgtcatcgacaataatggcacgattgaagaaacccgccgccagctgctggccattttacaccagtgggatctgctgggtaagggtggctccggccaccatcatcaccatcac

SEQ ID NO: 664 - protein, 211 aa, synthetic construct
  REGION 1..211: note = Variant of 3'O-kinase
MAFTIGLTGGIAAGKSTVSAMMRELGLPVIDADEAARAVMRPGEEAYRQIVAAFGPGLLRADGEIDRQKLGAIRFSDEQQRKVLNAIVGPAVLKKMLAEKEAHIRSGAKTVVLDIPLLFESGLTHWVDKVLVVYVDDDVQLRRLMARNGFTEEEALKRIRSQWPSAEKVKRADAVIDNNGTIEETRRQLLAILHQWDLLGKGGSGHHHHHH

SEQ ID NO: 665 - DNA, 633 bp, synthetic construct
  misc_feature 1..633: note = Variant of 3'O-kinase
  source 1..633: mol_type = other DNA
atggcgtttaccattggtattacaggagggatcgcagcgggcaaatcgactgtgagtgccatgatgcgtgaactgggtctgccggtcatcgatgctgacgaggcagcacgcgccgttatgcgtccaggcgaagaagcttatcgccagattgtagctgcgttcggtccgggcattcttcgtgccgatggcgagatcgatcgccagaaactgggtgctatccgcttttcggacgaacaacaacgtaaggtgctgaatgcgattgtaggtcctgcagtcctgaagaagatgctcgctgagaaagaagctcatatccgctcaggcgccaagacggttgtgctggatatcccgctgctgttcgaatccggattgacccattgggtcgacaaagtgctcgtggtgtacgtcgatgatgatgttcagttacgccgccttatggcacgtaacgggtttactgaagaagaagctctgaagcgcattcgttcacagtggcccagtgcggagaaagttaaacgtgcagacgctgtcatcgacaataatggcacgattgaagaaacccgccgccagctgctggccattttacaccagtgggatctgctgggtaagggtggctccggccaccatcatcaccatcac

SEQ ID NO: 666 - protein, 211 aa, synthetic construct
  REGION 1..211: note = Variant of 3'O-kinase
MAFTIGITGGIAAGKSTVSAMMRELGLPVIDADEAARAVMRPGEEAYRQIVAAFGPGILRADGEIDRQKLGAIRFSDEQQRKVLNAIVGPAVLKKMLAEKEAHIRSGAKTVVLDIPLLFESGLTHWVDKVLVVYVDDDVQLRRLMARNGFTEEEALKRIRSQWPSAEKVKRADAVIDNNGTIEETRRQLLAILHQWDLLGKGGSGHHHHHH

SEQ ID NO: 667 - DNA, 633 bp, synthetic construct
  misc_feature 1..633: note = Variant of 3'O-kinase
  source 1..633: mol_type = other DNA
atggcgtttaccattggtttaacaggagggatcgcagcgggcaaatcgactgtgagtgccatgatgcgtgaagcgggtctgccggtcatcgatgctgacgaggcagcacgcgccgttatgcgtccaggcgaagaagcttatcgccagattgtagctgcgttcggtccgggcattcttcgtgccgatggcgagatcgatcgccagaaactgggtgctatccgcttttcggacgaacaacaacgtaaggtgctgaatgcgattgtaggtcctgcagtcctgaagaagatgctcgctgagaaagaagctcatatccgctcaggcgccaagacggttgtgctggatatcccgctgctgttcgaatccggattgacccattgggtcgacaaagtgctcgtggtgtacgtcgatgatgatgttcagttacgccgccttatggcacgtaacgggtttactgaagaagaagctctgaagcgcattcgttcacagtggcccagtgcggagaaagttaaacgtgcagacgctgtcatcgacaataatggcacgattgaagaaacccgccgccagctgctggccattttacaccagtgggatctgctgggtaagggtggctccggccaccatcatcaccatcac

SEQ ID NO: 668 - protein, 211 aa, synthetic construct
  REGION 1..211: note = Variant of 3'O-kinase
MAFTIGLTGGIAAGKSTVSAMMREAGLPVIDADEAARAVMRPGEEAYRQIVAAFGPGILRADGEIDRQKLGAIRFSDEQQRKVLNAIVGPAVLKKMLAEKEAHIRSGAKTVVLDIPLLFESGLTHWVDKVLVVYVDDDVQLRRLMARNGFTEEEALKRIRSQWPSAEKVKRADAVIDNNGTIEETRRQLLAILHQWDLLGKGGSGHHHHHH

SEQ ID NO: 669 - DNA, 633 bp, synthetic construct
  misc_feature 1..633: note = Variant of 3'O-kinase
  source 1..633: mol_type = other DNA
atgttgtttaccattggtttaacaggagggatcgcagcgggcaaatcgactgtgagtgccatgatgcgtgaactgggtctgccggtcatcgatgctgacgaggcagcacgcgccgttatgcgtccaggcgaagaagcttatcgccagattgtagctgcgttcggtccgggcattcttcgtgccgatggcgagatcgatcgccagaaactgggtgctatccgcttttcggacgaacaacaacgtaaggtgctgaatgcgattgtaggtcctgcagtcctgaagaagatgctcgctgagaaagaagctcatatccgctcaggcgccaagacggttgtgctggatatcccgctgctgttcgaatccggattgacccattgggtcgacaaagtgctcgtggtgtacgtcgatgatgatgttcagttacgccgccttatggcacgtaacgggtttactgaagaagaagctctgaagcgcattcgttcacagtggcccagtgcggagaaagttaaacgtgcagacgctgtcatcgacaataatggcacgattgaagaaacccgccgccagctgctggccattttacaccagtgggatctgctgggtaagggtggctccggccaccatcatcaccatcac

SEQ ID NO: 670 - protein, 211 aa, synthetic construct
  REGION 1..211: note = Variant of 3'O-kinase
MLFTIGLTGGIAAGKSTVSAMMRELGLPVIDADEAARAVMRPGEEAYRQIVAAFGPGILRADGEIDRQKLGAIRFSDEQQRKVLNAIVGPAVLKKMLAEKEAHIRSGAKTVVLDIPLLFESGLTHWVDKVLVVYVDDDVQLRRLMARNGFTEEEALKRIRSQWPSAEKVKRADAVIDNNGTIEETRRQLLAILHQWDLLGKGGSGHHHHHH

SEQ ID NO: 671 - DNA, 633 bp, synthetic construct
  misc_feature 1..633: note = Variant of 3'O-kinase
  source 1..633: mol_type = other DNA
atggcgtttaccattggtttaacaggagggatcgcagcgggcaaatcgactgtgagtgccatgatgcgtgaactgggtctgccggtcatcgatgctgacgaggcagcacgcgccgttatgcgtccaggcgaagaagcttatcgccagattgtagctgcgttcggtccgggcattcttcgtgccgatggcgagatcgatcgccagaaactgggtgctatccgcttttcggacatgcaacaacgtaaggtgctgaatgcgattgtaggtcctgcagtcctgaagaagatgctcgctgagaaagaagctcatatccgctcaggcgccaagacggttgtgctggatatcccgctgctgttcgaatccggattgacccattgggtcgacaaagtgctcgtggtgtacgtcgatgatgatgttcagttacgccgccttatggcacgtaacgggtttactgaagaagaagctctgaagcgcattcgttcacagtggcccagtgcggagaaagttaaacgtgcagacgctgtcatcgacaataatggcacgattgaagaaacccgccgccagctgctggccattttacaccagtgggatctgctgggtaagggtggctccggccaccatcatcaccatcac

SEQ ID NO: 672 - protein, 211 aa, synthetic construct
  REGION 1..211: note = Variant of 3'O-kinase
MAFTIGLTGGIAAGKSTVSAMMRELGLPVIDADEAARAVMRPGEEAYRQIVAAFGPGILRADGEIDRQKLGAIRFSDMQQRKVLNAIVGPAVLKKMLAEKEAHIRSGAKTVVLDIPLLFESGLTHWVDKVLVVYVDDDVQLRRLMARNGFTEEEALKRIRSQWPSAEKVKRADAVIDNNGTIEETRRQLLAILHQWDLLGKGGSGHHHHHH

SEQ ID NO: 673 - DNA, 633 bp, synthetic construct
  misc_feature 1..633: note = Variant of 3'O-kinase
  source 1..633: mol_type = other DNA
atggcgtttaccattggtttaacaggagggatcgcagcgggcaaatcgactgtgagtgccatgatgcgtgaactgggtctgccggtcatcgatgctgacgaggcagcacgcgccgttatgcgtccaggcgaagaagcttatcgccagattgtagctgcgttcggtccgggcattcttcgtgccgatggcgagatcgatcgccagaaactgggtgctatccgcttttcggacgaacaacaacgtaaggtgctgaatgcgattgtaggtcctgcagtcctgaagaagatgctcgctgagaaagaagctcatatccgctcaggcgccaagacggttgtgctggatatcccgctgctgttcgaatccggattgacccatggtgtcgacaaagtgctcgtggtgtacgtcgatgatgatgttcagttacgccgccttatggcacgtaacgggtttactgaagaagaagctctgaagcgcattcgttcacagtggcccagtgcggagaaagttaaacgtgcagacgctgtcatcgacaataatggcacgattgaagaaacccgccgccagctgctggccattttacaccagtgggatctgctgggtaagggtggctccggccaccatcatcaccatcac

SEQ ID NO: 674 - protein, 211 aa, synthetic construct
  REGION 1..211: note = Variant of 3'O-kinase
MAFTIGLTGGIAAGKSTVSAMMRELGLPVIDADEAARAVMRPGEEAYRQIVAAFGPGILRADGEIDRQKLGAIRFSDEQQRKVLNAIVGPAVLKKMLAEKEAHIRSGAKTVVLDIPLLFESGLTHGVDKVLVVYVDDDVQLRRLMARNGFTEEEALKRIRSQWPSAEKVKRADAVIDNNGTIEETRRQLLAILHQWDLLGKGGSGHHHHHH

SEQ ID NO: 675 - DNA, 633 bp, synthetic construct
  misc_feature 1..633: note = Variant of 3'O-kinase
  source 1..633: mol_type = other DNA
atggcgtttaccattggtttaacaggagggatcgcagcgggcaaatcgactgtgagtgccatgatgcgtgaactgggtctgccggtcatcgatgctgacgaggcagcacgcgccgttatgcgtccaggcgaagaagcttatcgccagattgtagctgcgttcggtccgggcattcttcgtgccgatggcgagatcgatcgccagaaactgggtgctatccgcttttcggacgaacaacaacgtaaggtgctgaatgcgattgtaggtcctgcagtcctgaagaagatgctcgctgagaaagaagctcatatccgctcaggcgccaagacggttgtgctggatatcccgctgctgttcgaatccggattgacccattgggtcgacaaagtgctcgtggtgtacgtcgatgatgatgttcagttacgccgccttatggcacgtaacgggtttactgaagaagaagctctgaagcgcattcgttcacagtggcccagtgcggagaaagttgctcgtgcagacgctgtcatcgacaataatggcacgattgaagaaacccgccgccagctgctggccattttacaccagtgggatctgctgggtaagggtggctccggccaccatcatcaccatcac

SEQ ID NO: 676 - protein, 211 aa, synthetic construct
  REGION 1..211: note = Variant of 3'O-kinase
MAFTIGLTGGIAAGKSTVSAMMRELGLPVIDADEAARAVMRPGEEAYRQIVAAFGPGILRADGEIDRQKLGAIRFSDEQQRKVLNAIVGPAVLKKMLAEKEAHIRSGAKTVVLDIPLLFESGLTHWVDKVLVVYVDDDVQLRRLMARNGFTEEEALKRIRSQWPSAEKVARADAVIDNNGTIEETRRQLLAILHQWDLLGKGGSGHHHHHH

SEQ ID NO: 677 - DNA, 633 bp, synthetic construct
  misc_feature 1..633: note = Variant of 3'O-kinase
  source 1..633: mol_type = other DNA
atggcgtttaccattggtttaacaggagggatcgcagcgggcaaatcgactgtgagtgccatgatgcgtgaactgggtctgccggtcatcgatgctgacgaggcagcacgcgccgttatgcgtccaggcgaagaagcttatcgccagattgtagctgcgttcggtccgggcattcttcgtgccgatggcgagatcgatcgccagaaactgggtgctatccgcttttcggacgaacaacaacgtaaggtgctgaatgcgattgtaggtcctgcagtcctgaagaagatgctcgctgagaaagaagctcatatccgctcaggcgccaagacggttgtgctggatatcccgctgctgttcgaatccggattgacccattgggtcgacaaagtgctcgtggtgtacgtcgatgatgatgttcagttacgccgccttatggcacgtaacgggtttactgaagaagaagctctgaagcgcattcgttcacagtggcccagtgcggagaaagttaaacgtgcagacgctgtcatcgacaataatggcacgattgaagaaacccgccgccagctgctggccattttacaccagtgggatctgctgggttgtggtggctccggccaccatcatcaccatcac

SEQ ID NO: 678 - protein, 211 aa, synthetic construct
  REGION 1..211: note = Variant of 3'O-kinase
MAFTIGLTGGIAAGKSTVSAMMRELGLPVIDADEAARAVMRPGEEAYRQIVAAFGPGILRADGEIDRQKLGAIRFSDEQQRKVLNAIVGPAVLKKMLAEKEAHIRSGAKTVVLDIPLLFESGLTHWVDKVLVVYVDDDVQLRRLMARNGFTEEEALKRIRSQWPSAEKVKRADAVIDNNGTIEETRRQLLAILHQWDLLGCGGSGHHHHHH

SEQ ID NO: 679 - DNA, 633 bp, synthetic construct
  misc_feature 1..633: note = Variant of 3'O-kinase
  source 1..633: mol_type = other DNA
atggcgtttaccattggtttaacaggagggatcgcagcgggcaaatcgactgtgagtgccatgatgcgtgaactgggtctgactgtcatcgatgctgacgaggcagcacgcgccgttatgcgtccaggcgaagaagcttatcgccagattgtagctgcgttcggtccgggcattcttcgtgccgatggcgagatcgatcgccagaaactgggtgctatccgcttttcggacgaacaacaacgtaaggtgctgaatgcgattgtaggtcctgcagtcctgaagaagatgctcgctgagaaagaagctcatatccgctcaggcgccaagacggttgtgctggatatcccgctgctgttcgaatccggattgacccattgggtcgacaaagtgctcgtggtgtacgtcgatgatgatgttcagttacgccgccttatggcacgtaacgggtttactgaagaagaagctctgaagcgcattcgttcacagtggcccagtgcggagaaagttaaacgtgcagacgctgtcatcgacaataatggcacgattgaagaaacccgccgccagctgctggccattttacaccagtgggatctgctgggtaagggtggctccggccaccatcatcaccatcac

SEQ ID NO: 680 - protein, 211 aa, synthetic construct
  REGION 1..211: note = Variant of 3'O-kinase
MAFTIGLTGGIAAGKSTVSAMMRELGLTVIDADEAARAVMRPGEEAYRQIVAAFGPGILRADGEIDRQKLGAIRFSDEQQRKVLNAIVGPAVLKKMLAEKEAHIRSGAKTVVLDIPLLFESGLTHWVDKVLVVYVDDDVQLRRLMARNGFTEEEALKRIRSQWPSAEKVKRADAVIDNNGTIEETRRQLLAILHQWDLLGKGGSGHHHHHH

SEQ ID NO: 681 - DNA, 633 bp, synthetic construct
  misc_feature 1..633: note = Variant of 3'O-kinase
  source 1..633: mol_type = other DNA
atggcgtttaccattggtttaacaggagggatcgcagcgggcaaatcgactgtgagtgccatgatgcgtgaactgggtctgccggtcatcgatgctgacgaggcagcacgcgccgttatgcgtccaggcgaagaagcttatcgccagattgtagctgcgttcggtccgggcattcttcgtgccgatggcgagatcgatcgccagaaactgggtgctatccgcttttcggacgaacaacaacgtaaggtgctgggggcgattgtaggtcctgcagtcctgaagaagatgctcgctgagaaagaagctcatatccgctcaggcgccaagacggttgtgctggatatcccgctgctgttcgaatccggattgacccattgggtcgacaaagtgctcgtggtgtacgtcgatgatgatgttcagttacgccgccttatggcacgtaacgggtttactgaagaagaagctctgaagcgcattcgttcacagtggcccagtgcggagaaagttaaacgtgcagacgctgtcatcgacaataatggcacgattgaagaaacccgccgccagctgctggccattttacaccagtgggatctgctgggtaagggtggctccggccaccatcatcaccatcac

SEQ ID NO: 682 - protein, 211 aa, synthetic construct
  REGION 1..211: note = Variant of 3'O-kinase
MAFTIGLTGGIAAGKSTVSAMMRELGLPVIDADEAARAVMRPGEEAYRQIVAAFGPGILRADGEIDRQKLGAIRFSDEQQRKVLGAIVGPAVLKKMLAEKEAHIRSGAKTVVLDIPLLFESGLTHWVDKVLVVYVDDDVQLRRLMARNGFTEEEALKRIRSQWPSAEKVKRADAVIDNNGTIEETRRQLLAILHQWDLLGKGGSGHHHHHH

SEQ ID NO: 683 - DNA, 633 bp, synthetic construct
  misc_feature 1..633: note = Variant of 3'O-kinase
  source 1..633: mol_type = other DNA
atggcgtttaccattggtttaacaggagggatcgcagcgggcaaatcgactgtgagtgccatgatgcgtgaactgggtctgccggtcatcgatgctgacgaggcagcacgcgccgttatgcgtccaggcgaagaagcttatcgccagattctggctgcgttcggtccgggcattcttcgtgccgatggcgagatcgatcgccagaaactgggtgctatccgcttttcggacgaacaacaacgtaaggtgctgaatgcgattgtaggtcctgcagtcctgaagaagatgctcgctgagaaagaagctcatatccgctcaggcgccaagacggttgtgctggatatcccgctgctgttcgaatccggattgacccattgggtcgacaaagtgctcgtggtgtacgtcgatgatgatgttcagttacgccgccttatggcacgtaacgggtttactgaagaagaagctctgaagcgcattcgttcacagtggcccagtgcggagaaagttaaacgtgcagacgctgtcatcgacaataatggcacgattgaagaaacccgccgccagctgctggccattttacaccagtgggatctgctgggtaagggtggctccggccaccatcatcaccatcac

SEQ ID NO: 684 - protein, 211 aa, synthetic construct
  REGION 1..211: note = Variant of 3'O-kinase
MAFTIGLTGGIAAGKSTVSAMMRELGLPVIDADEAARAVMRPGEEAYRQILAAFGPGILRADGEIDRQKLGAIRFSDEQQRKVLNAIVGPAVLKKMLAEKEAHIRSGAKTVVLDIPLLFESGLTHWVDKVLVVYVDDDVQLRRLMARNGFTEEEALKRIRSQWPSAEKVKRADAVIDNNGTIEETRRQLLAILHQWDLLGKGGSGHHHHHH

SEQ ID NO: 685 - DNA, 633 bp, synthetic construct
  misc_feature 1..633: note = Variant of 3'O-kinase
  source 1..633: mol_type = other DNA
atggcgaagaccattggtttaacaggagggatcgcagcgggcaaatcgactgtgagtgccatgatgcgtgaactgggtctgccggtcatcgatgctgacgaggcagcacgcgccgttatgcgtccaggcgaagaagcttatcgccagattgtagctgcgttcggtccgggcattcttcgtgccgatggcgagatcgatcgccagaaactgggtgctatccgcttttcggacgaacaacaacgtaaggtgctgaatgcgattgtaggtcctgcagtcctgaagaagatgctcgctgagaaagaagctcatatccgctcaggcgccaagacggttgtgctggatatcccgctgctgttcgaatccggattgacccattgggtcgacaaagtgctcgtggtgtacgtcgatgatgatgttcagttacgccgccttatggcacgtaacgggtttactgaagaagaagctctgaagcgcattcgttcacagtggcccagtgcggagaaagttaaacgtgcagacgctgtcatcgacaataatggcacgattgaagaaacccgccgccagctgctggccattttacaccagtgggatctgctgggtaagggtggctccggccaccatcatcaccatcac

SEQ ID NO: 686 - protein, 211 aa, synthetic construct
  REGION 1..211: note = Variant of 3'O-kinase
MAKTIGLTGGIAAGKSTVSAMMRELGLPVIDADEAARAVMRPGEEAYRQIVAAFGPGILRADGEIDRQKLGAIRFSDEQQRKVLNAIVGPAVLKKMLAEKEAHIRSGAKTVVLDIPLLFESGLTHWVDKVLVVYVDDDVQLRRLMARNGFTEEEALKRIRSQWPSAEKVKRADAVIDNNGTIEETRRQLLAILHQWDLLGKGGSGHHHHHH

SEQ ID NO: 687 - DNA, 633 bp, synthetic construct
  misc_feature 1..633: note = Variant of 3'O-kinase
  source 1..633: mol_type = other DNA
atggcgtttaccattggtttaacaggagggatcgcagcgggcaaatcgactgtgagtgccatgatgcgtgaactgggtctgccggtcatcgatgctgacgaggcagcacgcgccgttatgcgtccaggctgtgaagcttatcgccagattgtagctgcgttcggtccgggcattcttcgtgccgatggcgagatcgatcgccagaaactgggtgctatccgcttttcggacgaacaacaacgtaaggtgctgaatgcgattgtaggtcctgcagtcctgaagaagatgctcgctgagaaagaagctcatatccgctcaggcgccaagacggttgtgctggatatcccgctgctgttcgaatccggattgacccattgggtcgacaaagtgctcgtggtgtacgtcgatgatgatgttcagttacgccgccttatggcacgtaacgggtttactgaagaagaagctctgaagcgcattcgttcacagtggcccagtgcggagaaagttaaacgtgcagacgctgtcatcgacaataatggcacgattgaagaaacccgccgccagctgctggccattttacaccagtgggatctgctgggtaagggtggctccggccaccatcatcaccatcac

SEQ ID NO: 688 - protein, 211 aa, synthetic construct
  REGION 1..211: note = Variant of 3'O-kinase
MAFTIGLTGGIAAGKSTVSAMMRELGLPVIDADEAARAVMRPGCEAYRQIVAAFGPGILRADGEIDRQKLGAIRFSDEQQRKVLNAIVGPAVLKKMLAEKEAHIRSGAKTVVLDIPLLFESGLTHWVDKVLVVYVDDDVQLRRLMARNGFTEEEALKRIRSQWPSAEKVKRADAVIDNNGTIEETRRQLLAILHQWDLLGKGGSGHHHHHH

SEQ ID NO: 689 - DNA, 633 bp, synthetic construct
  misc_feature 1..633: note = Variant of 3'O-kinase
  source 1..633: mol_type = other DNA
atggcgtttaccattggtttaacaggagggatcgcagcgggcaaatcgactgtgagtgccatgatgcgtgaactgggtctgccggtcatcgatgctgacgaggcagcacgcgccgttatgcgtccaggcgaagaagcttatcgccagattgtagctgcgttcggtccggctattcttcgtgccgatggcgagatcgatcgccagaaactgggtgctatccgcttttcggacgaacaacaacgtaaggtgctgaatgcgattgtaggtcctgcagtcctgaagaagatgctcgctgagaaagaagctcatatccgctcaggcgccaagacggttgtgctggatatcccgctgctgttcgaatccggattgacccattgggtcgacaaagtgctcgtggtgtacgtcgatgatgatgttcagttacgccgccttatggcacgtaacgggtttactgaagaagaagctctgaagcgcattcgttcacagtggcccagtgcggagaaagttaaacgtgcagacgctgtcatcgacaataatggcacgattgaagaaacccgccgccagctgctggccattttacaccagtgggatctgctgggtaagggtggctccggccaccatcatcaccatcac

SEQ ID NO: 690 - protein, 211 aa, synthetic construct
  REGION 1..211: note = Variant of 3'O-kinase
MAFTIGLTGGIAAGKSTVSAMMRELGLPVIDADEAARAVMRPGEEAYRQIVAAFGPAILRADGEIDRQKLGAIRFSDEQQRKVLNAIVGPAVLKKMLAEKEAHIRSGAKTVVLDIPLLFESGLTHWVDKVLVVYVDDDVQLRRLMARNGFTEEEALKRIRSQWPSAEKVKRADAVIDNNGTIEETRRQLLAILHQWDLLGKGGSGHHHHHH

SEQ ID NO: 691 - DNA, 633 bp, synthetic construct
  misc_feature 1..633: note = Variant of 3'O-kinase
  source 1..633: mol_type = other DNA
atggcgtttaccattggtttaacaggagggatcgcagcgggcaaatcgactgtgagtgccatgatgcgtgaactgggtctgccggtcatcgatgctgacgaggcagcacgcgccgttatgcgtccaggcgaagaagcttatcgccagattgtagctgcgttcggtccgggcattcttcgtgccgatggcgagatcgatcgccagaaactgggtgctatccgcttttcggacgaacaacaacgtaaggtgctgaatgcgattgtaggtcctgcagtcctgaagaagatgctcgctgagaaagaagctcatatccgctcaggcgccaagacggttgtgctggatatcccgctgctgttcgaactgggattgacccattgggtcgacaaagtgctcgtggtgtacgtcgatgatgatgttcagttacgccgccttatggcacgtaacgggtttactgaagaagaagctctgaagcgcattcgttcacagtggcccagtgcggagaaagttaaacgtgcagacgctgtcatcgacaataatggcacgattgaagaaacccgccgccagctgctggccattttacaccagtgggatctgctgggtaagggtggctccggccaccatcatcaccatcac

SEQ ID NO: 692 - protein, 211 aa, synthetic construct
  REGION 1..211: note = Variant of 3'O-kinase
MAFTIGLTGGIAAGKSTVSAMMRELGLPVIDADEAARAVMRPGEEAYRQIVAAFGPGILRADGEIDRQKLGAIRFSDEQQRKVLNAIVGPAVLKKMLAEKEAHIRSGAKTVVLDIPLLFELGLTHWVDKVLVVYVDDDVQLRRLMARNGFTEEEALKRIRSQWPSAEKVKRADAVIDNNGTIEETRRQLLAILHQWDLLGKGGSGHHHHHH

SEQ ID NO: 693 - DNA, 633 bp, synthetic construct
  misc_feature 1..633: note = Variant of 3'O-kinase
  source 1..633: mol_type = other DNA
atggcgtttaccattggtttaacaggagggatcgcagcgggcaaatcgactgtgagtgccatgatgcgtgaactgggtctggttgtcatcgatgctgacgaggcagcacgcgccgttatgcgtccaggcgaagaagcttatcgccagattgtagctgcgttcggtccgggcattcttcgtgccgatggcgagatcgatcgccagaaactgggtgctatccgcttttcggacgaacaacaacgtaaggtgctgaatgcgattgtaggtcctgcagtcctgaagaagatgctcgctgagaaagaagctcatatccgctcaggcgccaagacggttgtgctggatatcccgctgctgttcgaatccggattgacccattgggtcgacaaagtgctcgtggtgtacgtcgatgatgatgttcagttacgccgccttatggcacgtaacgggtttactgaagaagaagctctgaagcgcattcgttcacagtggcccagtgcggagaaagttaaacgtgcagacgctgtcatcgacaataatggcacgattgaagaaacccgccgccagctgctggccattttacaccagtgggatctgctgggtaagggtggctccggccaccatcatcaccatcac

SEQ ID NO: 694 - protein, 211 aa, synthetic construct
  REGION 1..211: note = Variant of 3'O-kinase
MAFTIGLTGGIAAGKSTVSAMMRELGLVVIDADEAARAVMRPGEEAYRQIVAAFGPGILRADGEIDRQKLGAIRFSDEQQRKVLNAIVGPAVLKKMLAEKEAHIRSGAKTVVLDIPLLFESGLTHWVDKVLVVYVDDDVQLRRLMARNGFTEEEALKRIRSQWPSAEKVKRADAVIDNNGTIEETRRQLLAILHQWDLLGKGGSGHHHHHH

SEQ ID NO: 695 - DNA, 633 bp, synthetic construct
  misc_feature 1..633: note = Variant of 3'O-kinase
  source 1..633: mol_type = other DNA
atggcgtttaccattggtatgacaggagggatcgcagcgggcaaatcgactgtgagtgccatgatgcgtgaactgggtctgccggtcatcgatgctgacgaggcagcacgcgccgttatgcgtccaggcgaagaagcttatcgccagattgtagctgcgttcggtccgggcattcttcgtgccgatggcgagatcgatcgccagaaactgggtgctatccgcttttcggacgaacaacaacgtaaggtgctgaatgcgattgtaggtcctgcagtcctgaagaagatgctcgctgagaaagaagctcatatccgctcaggcgccaagacggttgtgctggatatcccgctgctgttcgaatccggattgacccattgggtcgacaaagtgctcgtggtgtacgtcgatgatgatgttcagttacgccgccttatggcacgtaacgggtttactgaagaagaagctctgaagcgcattcgttcacagtggcccagtgcggagaaagttaaacgtgcagacgctgtcatcgacaataatggcacgattgaagaaacccgccgccagctgctggccattttacaccagtgggatctgctgggtaagggtggctccggccaccatcatcaccatcac

SEQ ID NO: 696 - protein, 211 aa, synthetic construct
  REGION 1..211: note = Variant of 3'O-kinase
MAFTIGMTGGIAAGKSTVSAMMRELGLPVIDADEAARAVMRPGEEAYRQIVAAFGPGILRADGEIDRQKLGAIRFSDEQQRKVLNAIVGPAVLKKMLAEKEAHIRSGAKTVVLDIPLLFESGLTHWVDKVLVVYVDDDVQLRRLMARNGFTEEEALKRIRSQWPSAEKVKRADAVIDNNGTIEETRRQLLAILHQWDLLGKGGSGHHHHHH

SEQ ID NO: 697 - DNA, 633 bp, synthetic construct
  misc_feature 1..633: note = Variant of 3'O-kinase
  source 1..633: mol_type = other DNA
atggcgtttaccattggtttaacaggagggatcgcagcgggcaaatcgactgtgagtgccatgatgcgtgaactgggtctgccggtcatcgatgctgacgaggcagcacgcgccgttatgcgtccaggcgaagaagcttatcgcggtattgtagctgcgttcggtccgggcattcttcgtgccgatggcgagatcgatcgccagaaactgggtgctatccgcttttcggacgaacaacaacgtaaggtgctgaatgcgattgtaggtcctgcagtcctgaagaagatgctcgctgagaaagaagctcatatccgctcaggcgccaagacggttgtgctggatatcccgctgctgttcgaatccggattgacccattgggtcgacaaagtgctcgtggtgtacgtcgatgatgatgttcagttacgccgccttatggcacgtaacgggtttactgaagaagaagctctgaagcgcattcgttcacagtggcccagtgcggagaaagttaaacgtgcagacgctgtcatcgacaataatggcacgattgaagaaacccgccgccagctgctggccattttacaccagtgggatctgctgggtaagggtggctccggccaccatcatcaccatcac

SEQ ID NO: 698 - protein, 211 aa, synthetic construct
  REGION 1..211: note = Variant of 3'O-kinase
MAFTIGLTGGIAAGKSTVSAMMRELGLPVIDADEAARAVMRPGEEAYRGIVAAFGPGILRADGEIDRQKLGAIRFSDEQQRKVLNAIVGPAVLKKMLAEKEAHIRSGAKTVVLDIPLLFESGLTHWVDKVLVVYVDDDVQLRRLMARNGFTEEEALKRIRSQWPSAEKVKRADAVIDNNGTIEETRRQLLAILHQWDLLGKGGSGHHHHHH

SEQ ID NO: 699 - DNA, 633 bp, synthetic construct
  misc_feature 1..633: note = Variant of 3'O-kinase
  source 1..633: mol_type = other DNA
atggcgtttaccattggtttaacaggagggatcgcagcgggcaaatcgactgtgagtgccatgatgcgtgaactgggtctgccggtcatcgatgctgacgaggcagcacgcgccgttatgcgtccaggcgaagaagcttatcgccagattgtagctgcgttcggtccgggcattcttcgtgccgatggcgagatcgatcgccagaaactgggtgctatccgcttttcggacgaacaacaacgtaaggtgctgaatgcgattgtaggtcctgcagtcctgaagaagatgctcgctgagaaagaagctcatatccgctcaggcgccaagacggttgtgctggatatcccgctgctgttcgaatccggattgacccggtgggtcgacaaagtgctcgtggtgtacgtcgatgatgatgttcagttacgccgccttatggcacgtaacgggtttactgaagaagaagctctgaagcgcattcgttcacagtggcccagtgcggagaaagttaaacgtgcagacgctgtcatcgacaataatggcacgattgaagaaacccgccgccagctgctggccattttacaccagtgggatctgctgggtaagggtggctccggccaccatcatcaccatcac

SEQ ID NO: 700 - protein, 211 aa, synthetic construct
  REGION 1..211: note = Variant of 3'O-kinase
MAFTIGLTGGIAAGKSTVSAMMRELGLPVIDADEAARAVMRPGEEAYRQIVAAFGPGILRADGEIDRQKLGAIRFSDEQQRKVLNAIVGPAVLKKMLAEKEAHIRSGAKTVVLDIPLLFESGLTRWVDKVLVVYVDDDVQLRRLMARNGFTEEEALKRIRSQWPSAEKVKRADAVIDNNGTIEETRRQLLAILHQWDLLGKGGSGHHHHHH

SEQ ID NO: 701 - DNA, 633 bp, synthetic construct
  misc_feature 1..633: note = Variant of 3'O-kinase
  source 1..633: mol_type = other DNA
atggcgtttaccattggtttaacaggagggatcgcagcgggcaaatcgactgtgagtgccatgatgcgtgaactgggtctgccggtcatcgatgctgacgaggcagcacgcgccgttatgcgtccaggcgaagaagcttatcgccagattgtagctgcgttcggtccgggctgtcttcgtgccgatggcgagatcgatcgccagaaactgggtgctatccgcttttcggacgaacaacaacgtaaggtgctgaatgcgattgtaggtcctgcagtcctgaagaagatgctcgctgagaaagaagctcatatccgctcaggcgccaagacggttgtgctggatatcccgctgctgttcgaatccggattgacccattgggtcgacaaagtgctcgtggtgtacgtcgatgatgatgttcagttacgccgccttatggcacgtaacgggtttactgaagaagaagctctgaagcgcattcgttcacagtggcccagtgcggagaaagttaaacgtgcagacgctgtcatcgacaataatggcacgattgaagaaacccgccgccagctgctggccattttacaccagtgggatctgctgggtaagggtggctccggccaccatcatcaccatcac

SEQ ID NO: 702 - protein, 211 aa, synthetic construct
  REGION 1..211: note = Variant of 3'O-kinase
MAFTIGLTGGIAAGKSTVSAMMRELGLPVIDADEAARAVMRPGEEAYRQIVAAFGPGCLRADGEIDRQKLGAIRFSDEQQRKVLNAIVGPAVLKKMLAEKEAHIRSGAKTVVLDIPLLFESGLTHWVDKVLVVYVDDDVQLRRLMARNGFTEEEALKRIRSQWPSAEKVKRADAVIDNNGTIEETRRQLLAILHQWDLLGKGGSGHHHHHH

SEQ ID NO: 703 - DNA, 633 bp, synthetic construct
  misc_feature 1..633: note = Variant of 3'O-kinase
  source 1..633: mol_type = other DNA
atggcgtttaccattggtttaacaggagggatcgcagcgggcaaatcgactgtgagtgccatgatgcgtgaactgggtctgccggtcatcgatgctgacgaggcagcacgcgccgttatgcgtccaggcgaagaagcttatcgccagattgtagctgcgttcggtccgggcattcttcgtgccgatgaggagatcgatcgccagaaactgggtgctatccgcttttcggacgaacaacaacgtaaggtgctgaatgcgattgtaggtcctgcagtcctgaagaagatgctcgctgagaaagaagctcatatccgctcaggcgccaagacggttgtgctggatatcccgctgctgttcgaatccggattgacccattgggtcgacaaagtgctcgtggtgtacgtcgatgatgatgttcagttacgccgccttatggcacgtaacgggtttactgaagaagaagctctgaagcgcattcgttcacagtggcccagtgcggagaaagttaaacgtgcagacgctgtcatcgacaataatggcacgattgaagaaacccgccgccagctgctggccattttacaccagtgggatctgctgggtaagggtggctccggccaccatcatcaccatcac

SEQ ID NO: 704 - protein, 211 aa, synthetic construct
  REGION 1..211: note = Variant of 3'O-kinase
MAFTIGLTGGIAAGKSTVSAMMRELGLPVIDADEAARAVMRPGEEAYRQIVAAFGPGILRADEEIDRQKLGAIRFSDEQQRKVLNAIVGPAVLKKMLAEKEAHIRSGAKTVVLDIPLLFESGLTHWVDKVLVVYVDDDVQLRRLMARNGFTEEEALKRIRSQWPSAEKVKRADAVIDNNGTIEETRRQLLAILHQWDLLGKGGSGHHHHHH

SEQ ID NO: 705 - DNA, 633 bp, synthetic construct
  misc_feature 1..633: note = Variant of 3'O-kinase
  source 1..633: mol_type = other DNA
atggcgtttaccattggtttaacaggagggatcgcagcgggcaaatcgactgtgagtgccatggcgcgtgaactgggtctgccggtcatcgatgctgacgaggcagcacgcgccgttatgcgtccaggcgaagaagcttatcgccagattgtagctgcgttcggtccgggcattcttcgtgccgatggcgagatcgatcgccagaaactgggtgctatccgcttttcggacgaacaacaacgtaaggtgctgaatgcgattgtaggtcctgcagtcctgaagaagatgctcgctgagaaagaagctcatatccgctcaggcgccaagacggttgtgctggatatcccgctgctgttcgaatccggattgacccattgggtcgacaaagtgctcgtggtgtacgtcgatgatgatgttcagttacgccgccttatggcacgtaacgggtttactgaagaagaagctctgaagcgcattcgttcacagtggcccagtgcggagaaagttaaacgtgcagacgctgtcatcgacaataatggcacgattgaagaaacccgccgccagctgctggccattttacaccagtgggatctgctgggtaagggtggctccggccaccatcatcaccatcac

SEQ ID NO: 706 - protein, 211 aa, synthetic construct
  REGION 1..211: note = Variant of 3'O-kinase
MAFTIGLTGGIAAGKSTVSAMARELGLPVIDADEAARAVMRPGEEAYRQIVAAFGPGILRADGEIDRQKLGAIRFSDEQQRKVLNAIVGPAVLKKMLAEKEAHIRSGAKTVVLDIPLLFESGLTHWVDKVLVVYVDDDVQLRRLMARNGFTEEEALKRIRSQWPSAEKVKRADAVIDNNGTIEETRRQLLAILHQWDLLGKGGSGHHHHHH

SEQ ID NO: 707 - DNA, 633 bp, synthetic construct
  misc_feature 1..633: note = Variant of 3'O-kinase
  source 1..633: mol_type = other DNA
atggcgtttaccattggtttaacaggagggatcgcagcgggcaaatcgactgtgagtgccatgatgcgtgaactgggtctgccggtcatcgatgctgacgaggcagcacgcgccgttatgcgtccaggcgaagaagcttatcgccagattgtagctgcgttcggtccgggcattcttcgtgccgatggcgagatcgatcgccagaaactgggtgctatccgcttttcggacgaacaacaacgtaaggtgctgaatgcgattgtaggtcctgcagtcctgaagaagatgctcgctgagaaagaagctcatatcgcttcaggcgccaagacggttgtgctggatatcccgctgctgttcgaatccggattgacccattgggtcgacaaagtgctcgtggtgtacgtcgatgatgatgttcagttacgccgccttatggcacgtaacgggtttactgaagaagaagctctgaagcgcattcgttcacagtggcccagtgcggagaaagttaaacgtgcagacgctgtcatcgacaataatggcacgattgaagaaacccgccgccagctgctggccattttacaccagtgggatctgctgggtaagggtggctccggccaccatcatcaccatcac

SEQ ID NO: 708 - protein, 211 aa, synthetic construct
  REGION 1..211: note = Variant of 3'O-kinase
MAFTIGLTGGIAAGKSTVSAMMRELGLPVIDADEAARAVMRPGEEAYRQIVAAFGPGILRADGEIDRQKLGAIRFSDEQQRKVLNAIVGPAVLKKMLAEKEAHIASGAKTVVLDIPLLFESGLTHWVDKVLVVYVDDDVQLRRLMARNGFTEEEALKRIRSQWPSAEKVKRADAVIDNNGTIEETRRQLLAILHQWDLLGKGGSGHHHHHH

SEQ ID NO: 709 - DNA, 633 bp, synthetic construct
  misc_feature 1..633: note = Variant of 3'O-kinase
  source 1..633: mol_type = other DNA
atggcgtttaccattggtttaacaggagggatcgcagcgggcaaatcgactgtgagtgccatgatgcgtgaactgggtctgccggtcatcgatgctgacgagatggcacgcgccgttatgcgtccaggcgaagaagcttatcgccagattgtagctgcgttcggtccgggcattcttcgtgccgatggcgagatcgatcgccagaaactgggtgctatccgcttttcggacgaacaacaacgtaaggtgctgaatgcgattgtaggtcctgcagtcctgaagaagatgctcgctgagaaagaagctcatatccgctcaggcgccaagacggttgtgctggatatcccgctgctgttcgaatccggattgacccattgggtcgacaaagtgctcgtggtgtacgtcgatgatgatgttcagttacgccgccttatggcacgtaacgggtttactgaagaagaagctctgaagcgcattcgttcacagtggcccagtgcggagaaagttaaacgtgcagacgctgtcatcgacaataatggcacgattgaagaaacccgccgccagctgctggccattttacaccagtgggatctgctgggtaagggtggctccggccaccatcatcaccatcac

SEQ ID NO: 710 - protein, 211 aa, synthetic construct
  REGION 1..211: note = Variant of 3'O-kinase
MAFTIGLTGGIAAGKSTVSAMMRELGLPVIDADEMARAVMRPGEEAYRQIVAAFGPGILRADGEIDRQKLGAIRFSDEQQRKVLNAIVGPAVLKKMLAEKEAHIRSGAKTVVLDIPLLFESGLTHWVDKVLVVYVDDDVQLRRLMARNGFTEEEALKRIRSQWPSAEKVKRADAVIDNNGTIEETRRQLLAILHQWDLLGKGGSGHHHHHH

SEQ ID NO: 711 - DNA, 633 bp, synthetic construct
  misc_feature 1..633: note = Variant of 3'O-kinase
  source 1..633: mol_type = other DNA
atggcgtttaccattggtttaacaggagggatcgcagcgggcaaatcgactgtgagtgccatgatgcgtgaactgggtctgccggtcatcgatgctgacgaggcagcacgcgccgttatgcgtccaggcgaagaagcttatcgccagattgtagctgcgttcggtccgggcattcttcgtgccgatggcgagatcgatcgccagaaactgggtgctatccgcttttcggacgaacaacaacgtaaggtgctgaatgcgattgtaggtcctgcagtcctgaagaagatgctcgctgagaaagaagctcatactcgctcaggcgccaagacggttgtgctggatatcccgctgctgttcgaatccggattgacccattgggtcgacaaagtgctcgtggtgtacgtcgatgatgatgttcagttacgccgccttatggcacgtaacgggtttactgaagaagaagctctgaagcgcattcgttcacagtggcccagtgcggagaaagttaaacgtgcagacgctgtcatcgacaataatggcacgattgaagaaacccgccgccagctgctggccattttacaccagtgggatctgctgggtaagggtggctccggccaccatcatcaccatcac

SEQ ID NO: 712 - protein, 211 aa, synthetic construct
  REGION 1..211: note = Variant of 3'O-kinase
MAFTIGLTGGIAAGKSTVSAMMRELGLPVIDADEAARAVMRPGEEAYRQIVAAFGPGILRADGEIDRQKLGAIRFSDEQQRKVLNAIVGPAVLKKMLAEKEAHTRSGAKTVVLDIPLLFESGLTHWVDKVLVVYVDDDVQLRRLMARNGFTEEEALKRIRSQWPSAEKVKRADAVIDNNGTIEETRRQLLAILHQWDLLGKGGSGHHHHHH

SEQ ID NO: 713 - DNA, 633 bp, synthetic construct
  misc_feature 1..633: note = Variant of 3'O-kinase
  source 1..633: mol_type = other DNA
atggcgtttaccattggtttaacaggagggatcgcagcgggcaaatcgactgtgagtgccatgatgcgtgaactgggtctgccggtcatcgatgctgacgaggcagcacgcgccgttatgcgtccaggcgaagaagcttatcgccagattgtagctgcgttcggtccgggcattcttcgtgccgatggcgagatcgatcgccagaaactgggtgctatccgcttttcggacgaacaacaacgtaaggtgctgaatgcgattgtaggtcctgcagtcctgaagaagatgctcgctgagaaagaagctcatatccgctcaggcgccaagacggttgtgctggatatcccgctgctgttcgaatccggattgacccattgggtcgacaaagtgctcgtggtgtacgtcgatgatgatgttcagttacgccgccttatggcacgtaacgggtttactgaagaagaagctctgaagcgcattcgttcacagtggcccagtgcggagaaagttaaacgtgcagacgctgtcatcgacaataatggcacgattgaagaaacccgccgccagctgctggccattttacaccagtgggatctgctgggtaaggatggctccggccaccatcatcaccatcac

SEQ ID NO: 714 - protein, 211 aa, synthetic construct
  REGION 1..211: note = Variant of 3'O-kinase
MAFTIGLTGGIAAGKSTVSAMMRELGLPVIDADEAARAVMRPGEEAYRQIVAAFGPGILRADGEIDRQKLGAIRFSDEQQRKVLNAIVGPAVLKKMLAEKEAHIRSGAKTVVLDIPLLFESGLTHWVDKVLVVYVDDDVQLRRLMARNGFTEEEALKRIRSQWPSAEKVKRADAVIDNNGTIEETRRQLLAILHQWDLLGKDGSGHHHHHH

SEQ ID NO: 715 - DNA, 633 bp, synthetic construct
  misc_feature 1..633: note = Variant of 3'O-kinase
  source 1..633: mol_type = other DNA
atggcgtttaccattggtttaacaggagggatcgcagcgggcaaatcgactgtgagtgccatgatgcgtgaactgggtctgccggtcatcgatgctgacgaggcagcacgcgccgttatgcgtccaggcgaagaagcttatcgccagattgtagctgcgttcggtccgggcattcttcgtgccgatggcgagatcgatcgccagaaactgggtgctatccgcttttcggacgaacaacaacgtaaggtgctgaatgcgattgtaggtcctgcagtcctgaagaagatgctcgctgagagggaagctcatatccgctcaggcgccaagacggttgtgctggatatcccgctgctgttcgaatccggattgacccattgggtcgacaaagtgctcgtggtgtacgtcgatgatgatgttcagttacgccgccttatggcacgtaacgggtttactgaagaagaagctctgaagcgcattcgttcacagtggcccagtgcggagaaagttaaacgtgcagacgctgtcatcgacaataatggcacgattgaagaaacccgccgccagctgctggccattttacaccagtgggatctgctgggtaagggtggctccggccaccatcatcaccatcac

SEQ ID NO: 716 - protein, 211 aa, synthetic construct
  REGION 1..211: note = Variant of 3'O-kinase
MAFTIGLTGGIAAGKSTVSAMMRELGLPVIDADEAARAVMRPGEEAYRQIVAAFGPGILRADGEIDRQKLGAIRFSDEQQRKVLNAIVGPAVLKKMLAEREAHIRSGAKTVVLDIPLLFESGLTHWVDKVLVVYVDDDVQLRRLMARNGFTEEEALKRIRSQWPSAEKVKRADAVIDNNGTIEETRRQLLAILHQWDLLGKGGSGHHHHHH

SEQ ID NO: 717 - DNA, 633 bp, synthetic construct
  misc_feature 1..633: note = Variant of 3'O-kinase
  source 1..633: mol_type = other DNA
atggcgtttaccattggtttaacaggagggatcgcagcgggcaaatcgactgtgagtgccatgatgcgtgaactgggtctgccggtcatcgatgctgacgaggcagcacgcgccgttatgcgtccaggcgaagaagcttatcgccagattgtagctgcgttcggtccgggcattcttcgtgccgatggcgagatcgatcgccagaaactgggtgctatccgcttttcggacgaacaacaacgtaaggtgctgaatgcgattgtaggtcctgcagtcctgaagaagatgctcgctgagaaagaagctcatatccgctcaggcgccaagacggttgtgctggatatcccgctgctgttcgaatccggattgacccattgggtcgacaaagtgctcgtggtgtacgtcgatgatgatgttcagttacgccgccttatggcacgtaacgggtttactgaagaagaagctctgaagcgcattcgttcacagtggcccagtgcggataaagttaaacgtgcagacgctgtcatcgacaataatggcacgattgaagaaacccgccgccagctgctggccattttacaccagtgggatctgctgggtaagggtggctccggccaccatcatcaccatcac

SEQ ID NO: 718 - protein, 211 aa, synthetic construct
  REGION 1..211: note = Variant of 3'O-kinase
MAFTIGLTGGIAAGKSTVSAMMRELGLPVIDADEAARAVMRPGEEAYRQIVAAFGPGILRADGEIDRQKLGAIRFSDEQQRKVLNAIVGPAVLKKMLAEKEAHIRSGAKTVVLDIPLLFESGLTHWVDKVLVVYVDDDVQLRRLMARNGFTEEEALKRIRSQWPSADKVKRADAVIDNNGTIEETRRQLLAILHQWDLLGKGGSGHHHHHH

SEQ ID NO: 719 - DNA, 633 bp, synthetic construct
  misc_feature 1..633: note = Variant of 3'O-kinase
  source 1..633: mol_type = other DNA
atggcgtttaccattggtttaacaggagggatcgcagcgggcaaatcgactgtgagtgccatgatgcgtgaactgggtctgccggtcatcgatgctgacgaggcagcacgcgccgttatgcgtccaggcgaagaagcttatcgccagattgtagctgcgttcggtccgggcattcttcgtgccgatggcgagatcgatcgccagaaactgggtgctatccgcttttcggacgaacaacaacgtaaggtgctgaatgcgattgtaggtcctgcagtcctgaagaagatgctcgctgagaaagaagctcatatccgctcaggcgccaagacggttgtgctggatatcccgctgctgttcgaatccggattgaccccgtgggtcgacaaagtgctcgtggtgtacgtcgatgatgatgttcagttacgccgccttatggcacgtaacgggtttactgaagaagaagctctgaagcgcattcgttcacagtggcccagtgcggagaaagttaaacgtgcagacgctgtcatcgacaataatggcacgattgaagaaacccgccgccagctgctggccattttacaccagtgggatctgctgggtaagggtggctccggccaccatcatcaccatcac

SEQ ID NO: 720 - protein, 211 aa, synthetic construct
  REGION 1..211: note = Variant of 3'O-kinase
MAFTIGLTGGIAAGKSTVSAMMRELGLPVIDADEAARAVMRPGEEAYRQIVAAFGPGILRADGEIDRQKLGAIRFSDEQQRKVLNAIVGPAVLKKMLAEKEAHIRSGAKTVVLDIPLLFESGLTPWVDKVLVVYVDDDVQLRRLMARNGFTEEEALKRIRSQWPSAEKVKRADAVIDNNGTIEETRRQLLAILHQWDLLGKGGSGHHHHHH

SEQ ID NO: 721 - DNA, 633 bp, synthetic construct
  misc_feature 1..633: note = Variant of 3'O-kinase
  source 1..633: mol_type = other DNA
atggcgtttaccattggtttaacaggagggatcgcagcgggcaaatcgactgtgggtgccatgatgcgtgaactgggtctgccggtcatcgatgctgacgaggcagcacgcgccgttatgcgtccaggcgaagaagcttatcgccagattgtagctgcgttcggtccgggcattcttcgtgccgatggcgagatcgatcgccagaaactgggtgctatccgcttttcggacgaacaacaacgtaaggtgctgaatgcgattgtaggtcctgcagtcctgaagaagatgctcgctgagaaagaagctcatatccgctcaggcgccaagacggttgtgctggatatcccgctgctgttcgaatccggattgacccattgggtcgacaaagtgctcgtggtgtacgtcgatgatgatgttcagttacgccgccttatggcacgtaacgggtttactgaagaagaagctctgaagcgcattcgttcacagtggcccagtgcggagaaagttaaacgtgcagacgctgtcatcgacaataatggcacgattgaagaaacccgccgccagctgctggccattttacaccagtgggatctgctgggtaagggtggctccggccaccatcatcaccatcac

SEQ ID NO: 722 - protein, 211 aa, synthetic construct
  REGION 1..211: note = Variant of 3'O-kinase
MAFTIGLTGGIAAGKSTVGAMMRELGLPVIDADEAARAVMRPGEEAYRQIVAAFGPGILRADGEIDRQKLGAIRFSDEQQRKVLNAIVGPAVLKKMLAEKEAHIRSGAKTVVLDIPLLFESGLTHWVDKVLVVYVDDDVQLRRLMARNGFTEEEALKRIRSQWPSAEKVKRADAVIDNNGTIEETRRQLLAILHQWDLLGKGGSGHHHHHH

SEQ ID NO: 723 - DNA, 633 bp, synthetic construct
  misc_feature 1..633: note = Variant of 3'O-kinase
  source 1..633: mol_type = other DNA
atggcgtttaccattggtttaacaggagggatcgcagcgggcaaatcgactgtgtgtgccatgatgcgtgaactgggtctgccggtcatcgatgctgacgaggcagcacgcgccgttatgcgtccaggcgaagaagcttatcgccagattgtagctgcgttcggtccgggcattcttcgtgccgatggcgagatcgatcgccagaaactgggtgctatccgcttttcggacgaacaacaacgtaaggtgctgaatgcgattgtaggtcctgcagtcctgaagaagatgctcgctgagaaagaagctcatatccgctcaggcgccaagacggttgtgctggatatcccgctgctgttcgaatccggattgacccattgggtcgacaaagtgctcgtggtgtacgtcgatgatgatgttcagttacgccgccttatggcacgtaacgggtttactgaagaagaagctctgaagcgcattcgttcacagtggcccagtgcggagaaagttaaacgtgcagacgctgtcatcgacaataatggcacgattgaagaaacccgccgccagctgctggccattttacaccagtgggatctgctgggtaagggtggctccggccaccatcatcaccatcac

SEQ ID NO: 724 - protein, 211 aa, synthetic construct
  REGION 1..211: note = Variant of 3'O-kinase
MAFTIGLTGGIAAGKSTVCAMMRELGLPVIDADEAARAVMRPGEEAYRQIVAAFGPGILRADGEIDRQKLGAIRFSDEQQRKVLNAIVGPAVLKKMLAEKEAHIRSGAKTVVLDIPLLFESGLTHWVDKVLVVYVDDDVQLRRLMARNGFTEEEALKRIRSQWPSAEKVKRADAVIDNNGTIEETRRQLLAILHQWDLLGKGGSGHHHHHH

SEQ ID NO: 725 - DNA, 633 bp, synthetic construct
  misc_feature 1..633: note = Variant of 3'O-kinase
  source 1..633: mol_type = other DNA
atggcgtttaccattggtttaacaggagggatcgcagcgggcaaatcgactgtgagtgccatgatgcgtgaactgggtctgccggtcatcgattgggacgaggcagcacgcgccgttatgcgtccaggcgaagaagcttatcgccagattgtagctgcgttcggtccgggcattcttcgtgccgatggcgagatcgatcgccagaaactgggtgctatccgcttttcggacgaacaacaacgtaaggtgctgaatgcgattgtaggtcctgcagtcctgaagaagatgctcgctgagaaagaagctcatatccgctcaggcgccaagacggttgtgctggatatcccgctgctgttcgaatccggattgacccattgggtcgacaaagtgctcgtggtgtacgtcgatgatgatgttcagttacgccgccttatggcacgtaacgggtttactgaagaagaagctctgaagcgcattcgttcacagtggcccagtgcggagaaagttaaacgtgcagacgctgtcatcgacaataatggcacgattgaagaaacccgccgccagctgctggccattttacaccagtgggatctgctgggtaagggtggctccggccaccatcatcaccatcac

SEQ ID NO: 726 - protein, 211 aa, synthetic construct
  REGION 1..211: note = Variant of 3'O-kinase
MAFTIGLTGGIAAGKSTVSAMMRELGLPVIDWDEAARAVMRPGEEAYRQIVAAFGPGILRADGEIDRQKLGAIRFSDEQQRKVLNAIVGPAVLKKMLAEKEAHIRSGAKTVVLDIPLLFESGLTHWVDKVLVVYVDDDVQLRRLMARNGFTEEEALKRIRSQWPSAEKVKRADAVIDNNGTIEETRRQLLAILHQWDLLGKGGSGHHHHHH

SEQ ID NO: 727 - DNA, 633 bp, synthetic construct
  misc_feature 1..633: note = Variant of 3'O-kinase
  source 1..633: mol_type = other DNA
atggcgtttaccattggtttaacaggagggatcgcagcgggcaaatcgactgtgagtgccatgatgcgtgaactgggtctgccggtcatcgatgctgacgaggcagcacgcgccgttatgcgtccaggcgaagaagcttatcgccagattgtagctgcgttcggtccgggcattcttcgtgccgatggcgagatcgatcgccagaaactgggtgctatccgcttttcgaatgaacaacaacgtaaggtgctgaatgcgattgtaggtcctgcagtcctgaagaagatgctcgctgagaaagaagctcatatccgctcaggcgccaagacggttgtgctggatatcccgctgctgttcgaatccggattgacccattgggtcgacaaagtgctcgtggtgtacgtcgatgatgatgttcagttacgccgccttatggcacgtaacgggtttactgaagaagaagctctgaagcgcattcgttcacagtggcccagtgcggagaaagttaaacgtgcagacgctgtcatcgacaataatggcacgattgaagaaacccgccgccagctgctggccattttacaccagtgggatctgctgggtaagggtggctccggccaccatcatcaccatcac

SEQ ID NO: 728 - protein, 211 aa, synthetic construct
  REGION 1..211: note = Variant of 3'O-kinase
MAFTIGLTGGIAAGKSTVSAMMRELGLPVIDADEAARAVMRPGEEAYRQIVAAFGPGILRADGEIDRQKLGAIRFSNEQQRKVLNAIVGPAVLKKMLAEKEAHIRSGAKTVVLDIPLLFESGLTHWVDKVLVVYVDDDVQLRRLMARNGFTEEEALKRIRSQWPSAEKVKRADAVIDNNGTIEETRRQLLAILHQWDLLGKGGSGHHHHHH

SEQ ID NO: 729 - DNA, 633 bp, synthetic construct
  misc_feature 1..633: note = Variant of 3'O-kinase
  source 1..633: mol_type = other DNA
atggcgtttaccattggtttaacaggagggatcgcagcgggcaaatcgactgtgagtgccatgatgcgtgaactgggtctgccggtcatcgatgctgacgaggcagcacgcgccgttatgcgtccaggcgaagaagcttatcgccagattgtagctgcgttcggtccgggcattcttcgtgccgatggcgagatcgatcgccagaaactgggtgctatccgcttttcggacgaacaacaacgtaaggtgctgaatgcgattgtaggtcctgcagtcctgaagaagatgctcgctgagaaagaagctcatatccgctcaggcgccaagacggttgtgctggatatcccgctgctgttcgaatccggattgacctgttgggtcgacaaagtgctcgtggtgtacgtcgatgatgatgttcagttacgccgccttatggcacgtaacgggtttactgaagaagaagctctgaagcgcattcgttcacagtggcccagtgcggagaaagttaaacgtgcagacgctgtcatcgacaataatggcacgattgaagaaacccgccgccagctgctggccattttacaccagtgggatctgctgggtaagggtggctccggccaccatcatcaccatcac

SEQ ID NO: 730 - protein, 211 aa, synthetic construct
  REGION 1..211: note = Variant of 3'O-kinase
MAFTIGLTGGIAAGKSTVSAMMRELGLPVIDADEAARAVMRPGEEAYRQIVAAFGPGILRADGEIDRQKLGAIRFSDEQQRKVLNAIVGPAVLKKMLAEKEAHIRSGAKTVVLDIPLLFESGLTCWVDKVLVVYVDDDVQLRRLMARNGFTEEEALKRIRSQWPSAEKVKRADAVIDNNGTIEETRRQLLAILHQWDLLGKGGSGHHHHHH

SEQ ID NO: 731 - DNA, 633 bp, synthetic construct
  misc_feature 1..633: note = Variant of 3'O-kinase
  source 1..633: mol_type = other DNA
atggcgtttaccattggtttaacaggagggatcgcagcgggcaaatcgactgtgagtgccatgatgcgtgaactgggtctgccggtcatcgatgctgacgaggcagcacgcgccgttatgcgtccaggcgaagaagcttatcgccagattgtagctgcgttcggtccgggcattcttcgtgccgatggcgagatcgatcgccagaaactgggtgctatccgcttttcggacgaacaacaacgtaaggtgctgaatgcgattgtaggtcctgcagtcctgaagaagatgctcgctgagaaagaagctcatatccgctcaggcgccaagacggttgtgctggatatcccgctgctgttcgaatccggattgacccattgggtcgacaaagtgctcgtggtgtacgtcgatgatgatgttcagttacgccgccttatggcacgtaacgggtttactgaagaagaagctctgaagcgcattcgttcacagtggcccagtgcggagaaagttaaacgtgcagacgctgtcatcgacaataatggcacgattgaagaaacccgccgccagctgctggccattttacaccagtgggatctgctgggtaagggtggcacgggccaccatcatcaccatcac

SEQ ID NO: 732 - protein, 211 aa, synthetic construct
  REGION 1..211: note = Variant of 3'O-kinase
MAFTIGLTGGIAAGKSTVSAMMRELGLPVIDADEAARAVMRPGEEAYRQIVAAFGPGILRADGEIDRQKLGAIRFSDEQQRKVLNAIVGPAVLKKMLAEKEAHIRSGAKTVVLDIPLLFESGLTHWVDKVLVVYVDDDVQLRRLMARNGFTEEEALKRIRSQWPSAEKVKRADAVIDNNGTIEETRRQLLAILHQWDLLGKGGTGHHHHHH

SEQ ID NO: 733 - DNA, 633 bp, synthetic construct
  misc_feature 1..633: note = Variant of 3'O-kinase
  source 1..633: mol_type = other DNA
atggcgtttaccattggtttaacaggagggatcgcagcgggcaaatcgactgtgagtgccatgatgcgtgaactgggtctgccggtcatcgatgctgacgaggcagcacgcgccgttatgcgtccaggcgaagaagcttatcgccagattgtagctgcgttcggtccgggcattcttcgtgccgatggcgagatcgatcgccagaaactgggtgctatccgcttttcggacgaacaacaacgtaaggtgctgaatgcgattgtaggtcctgcagtcctgaagaagatgctcattgagaaagaagctcatatccgctcaggcgccaagacggttgtgctggatatcccgctgctgttcgaatccggattgacccattgggtcgacaaagtgctcgtggtgtacgtcgatgatgatgttcagttacgccgccttatggcacgtaacgggtttactgaagaagaagctctgaagcgcattcgttcacagtggcccagtgcggagaaagttaaacgtgcagacgctgtcatcgacaataatggcacgattgaagaaacccgccgccagctgctggccattttacaccagtgggatctgctgggtaagggtggctccggccaccatcatcaccatcac

SEQ ID NO: 734 - protein, 211 aa, synthetic construct
  REGION 1..211: note = Variant of 3'O-kinase
MAFTIGLTGGIAAGKSTVSAMMRELGLPVIDADEAARAVMRPGEEAYRQIVAAFGPGILRADGEIDRQKLGAIRFSDEQQRKVLNAIVGPAVLKKMLIEKEAHIRSGAKTVVLDIPLLFESGLTHWVDKVLVVYVDDDVQLRRLMARNGFTEEEALKRIRSQWPSAEKVKRADAVIDNNGTIEETRRQLLAILHQWDLLGKGGSGHHHHHH

SEQ ID NO: 735 - DNA, 633 bp, synthetic construct
  misc_feature 1..633: note = Variant of 3'O-kinase
  source 1..633: mol_type = other DNA
atggcgtttaccattggtttaacaggagggatcgcagcgggcaaatcgactgtgagtgccatgatgcgtgaactgggtctgccggtcatcgatgctgacgaggcagcacgcgccgttatgcgtccaggcgaagaagcttatcgccagattgtagctgcgttcggtccgggcattcttcgtgccgatggcgagatcgatcgccagaaactgggtgctatccgcttttcggacgaacaacaacgtaaggtgctgaatgcgattgtaggtcctgcagtcctgaagaagatgctcgctgagaaagaagctcatatccgctcaggcgccaagacggttgtgctggatatcccgctgctgttcgaatccggattgacccattgggtcgacaaagtgctcgtggtgtacgtcgatgatgatgttcagttacgccgccttatggcacgtaacgggtttactgaagaagaagctctgaagcgcattcgttcacagtggcccagtgcggagaaagttaaacgtgcagacgctgtcatcgacaataatggcacgattgaagaaacccgccgccagctgctggccattttacaccagtgggatctgctgggtaagggtggccttggccaccatcatcaccatcac

SEQ ID NO: 736 - protein, 211 aa, synthetic construct
  REGION 1..211: note = Variant of 3'O-kinase
MAFTIGLTGGIAAGKSTVSAMMRELGLPVIDADEAARAVMRPGEEAYRQIVAAFGPGILRADGEIDRQKLGAIRFSDEQQRKVLNAIVGPAVLKKMLAEKEAHIRSGAKTVVLDIPLLFESGLTHWVDKVLVVYVDDDVQLRRLMARNGFTEEEALKRIRSQWPSAEKVKRADAVIDNNGTIEETRRQLLAILHQWDLLGKGGLGHHHHHH

SEQ ID NO: 737 - DNA, 633 bp, synthetic construct
  misc_feature 1..633: note = Variant of 3'O-kinase
  source 1..633: mol_type = other DNA
atggcgtttaccattggtttaacaggagggatcgcagcgggcaaatcgactgtgagtgccatgatgcgtgaactgggtctgccgtgtatcgatgctgacgaggcagcacgcgccgttatgcgtccaggcgaagaagcttatcgccagattgtagctgcgttcggtccgggcattcttcgtgccgatggcgagatcgatcgccagaaactgggtgctatccgcttttcggacgaacaacaacgtaaggtgctgaatgcgattgtaggtcctgcagtcctgaagaagatgctcgctgagaaagaagctcatatccgctcaggcgccaagacggttgtgctggatatcccgctgctgttcgaatccggattgacccattgggtcgacaaagtgctcgtggtgtacgtcgatgatgatgttcagttacgccgccttatggcacgtaacgggtttactgaagaagaagctctgaagcgcattcgttcacagtggcccagtgcggagaaagttaaacgtgcagacgctgtcatcgacaataatggcacgattgaagaaacccgccgccagctgctggccattttacaccagtgggatctgctgggtaagggtggctccggccaccatcatcaccatcac

SEQ ID NO: 738 - protein, 211 aa, synthetic construct
  REGION 1..211: note = Variant of 3'O-kinase
MAFTIGLTGGIAAGKSTVSAMMRELGLPCIDADEAARAVMRPGEEAYRQIVAAFGPGILRADGEIDRQKLGAIRFSDEQQRKVLNAIVGPAVLKKMLAEKEAHIRSGAKTVVLDIPLLFESGLTHWVDKVLVVYVDDDVQLRRLMARNGFTEEEALKRIRSQWPSAEKVKRADAVIDNNGTIEETRRQLLAILHQWDLLGKGGSGHHHHHH

SEQ ID NO: 739 - DNA, 633 bp, synthetic construct
  misc_feature 1..633: note = Variant of 3'O-kinase
  source 1..633: mol_type = other DNA
atggcgtttaccattggtttaacaggagggatcgcagcgggcaaatcgactgtgagtgccatgatgcgtgaactgggtctgccggtcatcgatgctgacgaggcagcacgcgccgttatgcgtccaggcgaagaagcttatcgccagattgtagctgcgttcggtccgggcattcttcgtgccgatggcgagatcgatcgccagaaactgggtgctatccgcttttcggacgaacaacaacgtaaggtgctgaatgcgattgtaggtcctgcagtcctgaagaagatgctcgctgagaaagaagctcatatccgctcaggcgccaagacggttgtgctggatatcccgctgctgttcgaatccggattgaccatgtgggtcgacaaagtgctcgtggtgtacgtcgatgatgatgttcagttacgccgccttatggcacgtaacgggtttactgaagaagaagctctgaagcgcattcgttcacagtggcccagtgcggagaaagttaaacgtgcagacgctgtcatcgacaataatggcacgattgaagaaacccgccgccagctgctggccattttacaccagtgggatctgctgggtaagggtggctccggccaccatcatcaccatcac

SEQ ID NO: 740 - protein, 211 aa, synthetic construct
  REGION 1..211: note = Variant of 3'O-kinase
MAFTIGLTGGIAAGKSTVSAMMRELGLPVIDADEAARAVMRPGEEAYRQIVAAFGPGILRADGEIDRQKLGAIRFSDEQQRKVLNAIVGPAVLKKMLAEKEAHIRSGAKTVVLDIPLLFESGLTMWVDKVLVVYVDDDVQLRRLMARNGFTEEEALKRIRSQWPSAEKVKRADAVIDNNGTIEETRRQLLAILHQWDLLGKGGSGHHHHHH

SEQ ID NO: 741 - DNA, 633 bp, synthetic construct
  misc_feature 1..633: note = Variant of 3'O-kinase
  source 1..633: mol_type = other DNA
atggcgtttaccattggtttaacaggagggatcgcagcgggcaaatcgactgtgagtgccatgatgcgtgaactgggtctgccggtcatcgatgctgacgaggcagcacgcgccgttatgcgtccaggcgaagaagcttatcgccagattgtagctgcgttcggtccgggcattcttcgtgccgatggcgagatcgatcgccagaaactgggtgctatccgcttttcggacgaacaacaacgtaaggtgctgaatgcgattgtaggtcctgcagtcctgaagaagatgctcgctgagaaagaagctcatatccgctcaggcgccaagacggttgtgctggatatcccgctgctgttcgaatccggattgacccattgggtcgacaaagtgctcgtggtgtacgtcgcggatgatgttcagttacgccgccttatggcacgtaacgggtttactgaagaagaagctctgaagcgcattcgttcacagtggcccagtgcggagaaagttaaacgtgcagacgctgtcatcgacaataatggcacgattgaagaaacccgccgccagctgctggccattttacaccagtgggatctgctgggtaagggtggctccggccaccatcatcaccatcac

SEQ ID NO: 742 - protein, 211 aa, synthetic construct
  REGION 1..211: note = Variant of 3'O-kinase
MAFTIGLTGGIAAGKSTVSAMMRELGLPVIDADEAARAVMRPGEEAYRQIVAAFGPGILRADGEIDRQKLGAIRFSDEQQRKVLNAIVGPAVLKKMLAEKEAHIRSGAKTVVLDIPLLFESGLTHWVDKVLVVYVADDVQLRRLMARNGFTEEEALKRIRSQWPSAEKVKRADAVIDNNGTIEETRRQLLAILHQWDLLGKGGSGHHHHHH

SEQ ID NO: 743 - DNA, 633 bp, synthetic construct
  misc_feature 1..633: note = Variant of 3'O-kinase
  source 1..633: mol_type = other DNA
atggcgtttaccattggtttaacaggagggatcgcagcgggcaaatcgactgtgagtgccatgatgcgtgaactgggtctgccggtcatcgatgctgacgaggcagcacgcgccgttatgcgtccaggcgaagaagcttatcgccagattgtagctgcgttcggtccgggcattcttcgtgccgatggcgagatcgatcgccagaaactgggtgctatccgcttttcggacgaacaacaacgtaaggtgctgaatgcgattgtaggtcctgcagtcctgaagaagatgctcgctgagaaagaagctcatatccgctcaggcgccaagacggttgtgctggatatcccgctgctgttcgaatccggattgacccattgggtcgacaaagtgctcgtggtgtacgtcgatgatgatgttcagttacgccgccttatggcacgtaacgggtttactgaagaagaagctctgaagcgcattcgttcacagtggcccagtgcggagaaagttaaacgtgcagacgctgtcatcgacaataatggcacgattgaagaaacccgccgccagctgctggccattttacaccagtgggatctgctgggtgctggtggctccggccaccatcatcaccatcac

SEQ ID NO: 744 - protein, 211 aa, synthetic construct
  REGION 1..211: note = Variant of 3'O-kinase
MAFTIGLTGGIAAGKSTVSAMMRELGLPVIDADEAARAVMRPGEEAYRQIVAAFGPGILRADGEIDRQKLGAIRFSDEQQRKVLNAIVGPAVLKKMLAEKEAHIRSGAKTVVLDIPLLFESGLTHWVDKVLVVYVDDDVQLRRLMARNGFTEEEALKRIRSQWPSAEKVKRADAVIDNNGTIEETRRQLLAILHQWDLLGAGGSGHHHHHH

SEQ ID NO: 745 - DNA, 633 bp, synthetic construct
  misc_feature 1..633: note = Variant of 3'O-kinase
  source 1..633: mol_type = other DNA
atggcgtttaccattggtttaacaggagggatcgcagcgggcaaatcgactgtgagtgccatgatgcgtgaactgggtctgccggtcatcgatgctgacgaggcagcacgcgccgttatgcgtccaggcgaagaagcttatcgccatattgtagctgcgttcggtccgggcattcttcgtgccgatggcgagatcgatcgccagaaactgggtgctatccgcttttcggacgaacaacaacgtaaggtgctgaatgcgattgtaggtcctgcagtcctgaagaagatgctcgctgagaaagaagctcatatccgctcaggcgccaagacggttgtgctggatatcccgctgctgttcgaatccggattgacccattgggtcgacaaagtgctcgtggtgtacgtcgatgatgatgttcagttacgccgccttatggcacgtaacgggtttactgaagaagaagctctgaagcgcattcgttcacagtggcccagtgcggagaaagttaaacgtgcagacgctgtcatcgacaataatggcacgattgaagaaacccgccgccagctgctggccattttacaccagtgggatctgctgggtaagggtggctccggccaccatcatcaccatcac

SEQ ID NO: 746 - protein, 211 aa, synthetic construct
  REGION 1..211: note = Variant of 3'O-kinase
MAFTIGLTGGIAAGKSTVSAMMRELGLPVIDADEAARAVMRPGEEAYRHIVAAFGPGILRADGEIDRQKLGAIRFSDEQQRKVLNAIVGPAVLKKMLAEKEAHIRSGAKTVVLDIPLLFESGLTHWVDKVLVVYVDDDVQLRRLMARNGFTEEEALKRIRSQWPSAEKVKRADAVIDNNGTIEETRRQLLAILHQWDLLGKGGSGHHHHHH

SEQ ID NO: 747 - DNA, 633 bp, synthetic construct
  misc_feature 1..633: note = Variant of 3'O-kinase
  source 1..633: mol_type = other DNA
atggcgtttaccattggtttaacaggagggatcgcagcgggcaaatcgactgtgagtgccatgatgcgtgaactgggtctgccggtcatcgatgctgacgaggcagcacgcgccgttatgcgtccaggcgaagaagcttatcgccagattgtagctgcgttcggtccgggcattcttcgtgccgatggcgagatcgatcgccagaaactgggtgctatccgcttttcggacgaacaacaacgtaaggtgctgaatgcgattgtaggtcctgcagtcctgaagaagatgaatgctgagaaagaagctcatatccgctcaggcgccaagacggttgtgctggatatcccgctgctgttcgaatccggattgacccattgggtcgacaaagtgctcgtggtgtacgtcgatgatgatgttcagttacgccgccttatggcacgtaacgggtttactgaagaagaagctctgaagcgcattcgttcacagtggcccagtgcggagaaagttaaacgtgcagacgctgtcatcgacaataatggcacgattgaagaaacccgccgccagctgctggccattttacaccagtgggatctgctgggtaagggtggctccggccaccatcatcaccatcac

SEQ ID NO: 748 - protein, 211 aa, synthetic construct
  REGION 1..211: note = Variant of 3'O-kinase
MAFTIGLTGGIAAGKSTVSAMMRELGLPVIDADEAARAVMRPGEEAYRQIVAAFGPGILRADGEIDRQKLGAIRFSDEQQRKVLNAIVGPAVLKKMNAEKEAHIRSGAKTVVLDIPLLFESGLTHWVDKVLVVYVDDDVQLRRLMARNGFTEEEALKRIRSQWPSAEKVKRADAVIDNNGTIEETRRQLLAILHQWDLLGKGGSGHHHHHH

SEQ ID NO: 749 - DNA, 633 bp, synthetic construct
  misc_feature 1..633: note = Variant of 3'O-kinase
  source 1..633: mol_type = other DNA
atggcgtttaccattggtttaacaggagggatcgcagcgggcaaatcgactgtgagtgccatgatgcgtgaactgggtctgccggtcatcgatgctgacgaggcagcacgcgccgttatgcgtccaggcgaagaagcttatcgccagattgtagctgcgttcggtccgggcattcttcgtgccgatggcgagatcgatcgccagaaactgggtgctatccgcttttcggacgaacaacaacgtaaggtgctgaatgcgattgtaggtcctgcagtcctgaagaagatgctcgctgagaaagaagctcatatccgctcaggcgccaagacggttgtgctggatatcccgctgctgttcgaatccggattgacccattgggtcgacaaagtgctcgtggtgtacgtcgatgatgatgttcagttacgccgccttatggcacgtaacgggtttactgaagatgaagctctgaagcgcattcgttcacagtggcccagtgcggagaaagttaaacgtgcagacgctgtcatcgacaataatggcacgattgaagaaacccgccgccagctgctggccattttacaccagtgggatctgctgggtaagggtggctccggccaccatcatcaccatcac

SEQ ID NO: 750 - protein, 211 aa, synthetic construct
  REGION 1..211: note = Variant of 3'O-kinase
MAFTIGLTGGIAAGKSTVSAMMRELGLPVIDADEAARAVMRPGEEAYRQIVAAFGPGILRADGEIDRQKLGAIRFSDEQQRKVLNAIVGPAVLKKMLAEKEAHIRSGAKTVVLDIPLLFESGLTHWVDKVLVVYVDDDVQLRRLMARNGFTEDEALKRIRSQWPSAEKVKRADAVIDNNGTIEETRRQLLAILHQWDLLGKGGSGHHHHHH

SEQ ID NO: 751 - DNA, 633 bp, synthetic construct
  misc_feature 1..633: note = Variant of 3'O-kinase
  source 1..633: mol_type = other DNA
atggcgtttaccattggtttaacaggagggatcgcagcgggcaaatcgactgtgagtgccatgatgcgtgaactgggtctgccggtcatcgatgctgacgaggcagcacgcgccgttatgcgtccaggcgaagaagcttatcgccagattgtagctgcgttcggtccgggcattcttcgtgccgatggcgagatcgatcgccagaaactgggtgctatccgcttttcggacgaacaacaacgtaaggtgctgaatgcgattgtaggtcctgcagtcctgaagaagatgctcgctgagaaagaagctcatatccgctcaggcgccaagacggttgtgctggatatcccgctgctgttcgaatccggattgacccattgggtcgacaaagtgctcgtggtgtacgtcgatgatgatgttcagttacgccgccttatggcacgtaacgggtttactgaagtggaagctctgaagcgcattcgttcacagtggcccagtgcggagaaagttaaacgtgcagacgctgtcatcgacaataatggcacgattgaagaaacccgccgccagctgctggccattttacaccagtgggatctgctgggtaagggtggctccggccaccatcatcaccatcac

SEQ ID NO: 752 - protein, 211 aa, synthetic construct
  REGION 1..211: note = Variant of 3'O-kinase
MAFTIGLTGGIAAGKSTVSAMMRELGLPVIDADEAARAVMRPGEEAYRQIVAAFGPGILRADGEIDRQKLGAIRFSDEQQRKVLNAIVGPAVLKKMLAEKEAHIRSGAKTVVLDIPLLFESGLTHWVDKVLVVYVDDDVQLRRLMARNGFTEVEALKRIRSQWPSAEKVKRADAVIDNNGTIEETRRQLLAILHQWDLLGKGGSGHHHHHH

SEQ ID NO: 753 - DNA, 633 bp, synthetic construct
  misc_feature 1..633: note = Variant of 3'O-kinase
  source 1..633: mol_type = other DNA
atggcgctgaccattggtttaacaggagggatcgcagcgggcaaatcgactgtgagtgccatgatgcgtgaactgggtctgccggtcatcgatgctgacgaggcagcacgcgccgttatgcgtccaggcgaagaagcttatcgccagattgtagctgcgttcggtccgggcattcttcgtgccgatggcgagatcgatcgccagaaactgggtgctatccgcttttcggacgaacaacaacgtaaggtgctgaatgcgattgtaggtcctgcagtcctgaagaagatgctcgctgagaaagaagctcatatccgctcaggcgccaagacggttgtgctggatatcccgctgctgttcgaatccggattgacccattgggtcgacaaagtgctcgtggtgtacgtcgatgatgatgttcagttacgccgccttatggcacgtaacgggtttactgaagaagaagctctgaagcgcattcgttcacagtggcccagtgcggagaaagttaaacgtgcagacgctgtcatcgacaataatggcacgattgaagaaacccgccgccagctgctggccattttacaccagtgggatctgctgggtaagggtggctccggccaccatcatcaccatcac

SEQ ID NO: 754 - protein, 211 aa, synthetic construct
  REGION 1..211: note = Variant of 3'O-kinase
MALTIGLTGGIAAGKSTVSAMMRELGLPVIDADEAARAVMRPGEEAYRQIVAAFGPGILRADGEIDRQKLGAIRFSDEQQRKVLNAIVGPAVLKKMLAEKEAHIRSGAKTVVLDIPLLFESGLTHWVDKVLVVYVDDDVQLRRLMARNGFTEEEALKRIRSQWPSAEKVKRADAVIDNNGTIEETRRQLLAILHQWDLLGKGGSGHHHHHH

SEQ ID NO: 755 - DNA, 633 bp, synthetic construct
  misc_feature 1..633: note = Variant of 3'O-kinase
  source 1..633: mol_type = other DNA
atggcgtttaccattggtttaacaggagggatcgcagcgggcaaatcgactgtgagtgccatgatgcgtgaactgggtctgccggtcatcgatgctgacgaggcagcacgcgccgttatgcgtccaggcgaagaagcttatcgcatgattgtagctgcgttcggtccgggcattcttcgtgccgatggcgagatcgatcgccagaaactgggtgctatccgcttttcggacgaacaacaacgtaaggtgctgaatgcgattgtaggtcctgcagtcctgaagaagatgctcgctgagaaagaagctcatatccgctcaggcgccaagacggttgtgctggatatcccgctgctgttcgaatccggattgacccattgggtcgacaaagtgctcgtggtgtacgtcgatgatgatgttcagttacgccgccttatggcacgtaacgggtttactgaagaagaagctctgaagcgcattcgttcacagtggcccagtgcggagaaagttaaacgtgcagacgctgtcatcgacaataatggcacgattgaagaaacccgccgccagctgctggccattttacaccagtgggatctgctgggtaagggtggctccggccaccatcatcaccatcac

SEQ ID NO: 756 - protein, 211 aa, synthetic construct
  REGION 1..211: note = Variant of 3'O-kinase
MAFTIGLTGGIAAGKSTVSAMMRELGLPVIDADEAARAVMRPGEEAYRMIVAAFGPGILRADGEIDRQKLGAIRFSDEQQRKVLNAIVGPAVLKKMLAEKEAHIRSGAKTVVLDIPLLFESGLTHWVDKVLVVYVDDDVQLRRLMARNGFTEEEALKRIRSQWPSAEKVKRADAVIDNNGTIEETRRQLLAILHQWDLLGKGGSGHHHHHH

SEQ ID NO: 757 - DNA, 633 bp, synthetic construct
  misc_feature 1..633: note = Variant of 3'O-kinase
  source 1..633: mol_type = other DNA
atggcgtttaccattggtttaacaggagggatcgcagatggcaaatcgactgtgagtgccatgatgcgtgaactgggtctgccggtcatcgatgctgacgaggcagcacgcgccgttatgcgtccaggcgaagaagcttatcgccagattgtagctgcgttcggtccgggcattcttcgtgccgatggcgagatcgatcgccagaaactgggtgctatccgcttttcggacgaacaacaacgtaaggtgctgaatgcgattgtaggtcctgcagtcctgaagaagatgctcgctgagaaagaagctcatatccgctcaggcgccaagacggttgtgctggatatcccgctgctgttcgaatccggattgacccattgggtcgacaaagtgctcgtggtgtacgtcgatgatgatgttcagttacgccgccttatggcacgtaacgggtttactgaagaagaagctctgaagcgcattcgttcacagtggcccagtgcggagaaagttaaacgtgcagacgctgtcatcgacaataatggcacgattgaagaaacccgccgccagctgctggccattttacaccagtgggatctgctgggtaagggtggctccggccaccatcatcaccatcac

SEQ ID NO: 758 - protein, 211 aa, synthetic construct
  REGION 1..211: note = Variant of 3'O-kinase
MAFTIGLTGGIADGKSTVSAMMRELGLPVIDADEAARAVMRPGEEAYRQIVAAFGPGILRADGEIDRQKLGAIRFSDEQQRKVLNAIVGPAVLKKMLAEKEAHIRSGAKTVVLDIPLLFESGLTHWVDKVLVVYVDDDVQLRRLMARNGFTEEEALKRIRSQWPSAEKVKRADAVIDNNGTIEETRRQLLAILHQWDLLGKGGSGHHHHHH

SEQ ID NO: 759 - DNA, 633 bp, synthetic construct
  misc_feature 1..633: note = Variant of 3'O-kinase
  source 1..633: mol_type = other DNA
atggcgtttaccattggtttaacaggagggatcgcagcgggcaaatcgactgtgagtgccatgatgcgtgaactgggtctgccggtcatcgatgctgacgaggcagcacgcgccgttatgcgtccaggcgaagaagcttatcgccagattgtagctgcgttcggtccgggcattcttcgtgccgatggcgagatcgatcgccagaaactgggtgctatccgcttttcggacgaacaacaacgtaaggtgctgaatgcgattgtaggtcctgcagtcctgaagaagatgctcgctgagaaagaagctcatatccgctcaggcgccaagacggttgtgctggatatcccgctgctgttcgaatccggattgacccattgggtcgacaaagtgctcgtggtgtacgtcgatgatgatgttcagttagatcgccttatggcacgtaacgggtttactgaagaagaagctctgaagcgcattcgttcacagtggcccagtgcggagaaagttaaacgtgcagacgctgtcatcgacaataatggcacgattgaagaaacccgccgccagctgctggccattttacaccagtgggatctgctgggtaagggtggctccggccaccatcatcaccatcac

SEQ ID NO: 760 - protein, 211 aa, synthetic construct
  REGION 1..211: note = Variant of 3'O-kinase
MAFTIGLTGGIAAGKSTVSAMMRELGLPVIDADEAARAVMRPGEEAYRQIVAAFGPGILRADGEIDRQKLGAIRFSDEQQRKVLNAIVGPAVLKKMLAEKEAHIRSGAKTVVLDIPLLFESGLTHWVDKVLVVYVDDDVQLDRLMARNGFTEEEALKRIRSQWPSAEKVKRADAVIDNNGTIEETRRQLLAILHQWDLLGKGGSGHHHHHH

SEQ ID NO: 761 - DNA, 633 bp, synthetic construct
  misc_feature 1..633: note = Variant of 3'O-kinase
  source 1..633: mol_type = other DNA
atggcgtttaccattggtttaacaggagggatcgcagcgggcaaatcgactgtgagtgccatgatgcgtgaactgggtctgccggtcatcgatgctgacgaggcagcacgcgccgttatgcgtccaggcgaagaagcttatcgccagattgtagctaagttcggtccgggcattcttcgtgccgatggcgagatcgatcgccagaaactgggtgctatccgcttttcggacgaacaacaacgtaaggtgctgaatgcgattgtaggtcctgcagtcctgaagaagatgctcgctgagaaagaagctcatatccgctcaggcgccaagacggttgtgctggatatcccgctgctgttcgaatccggattgacccattgggtcgacaaagtgctcgtggtgtacgtcgatgatgatgttcagttacgccgccttatggcacgtaacgggtttactgaagaagaagctctgaagcgcattcgttcacagtggcccagtgcggagaaagttaaacgtgcagacgctgtcatcgacaataatggcacgattgaagaaacccgccgccagctgctggccattttacaccagtgggatctgctgggtaagggtggctccggccaccatcatcaccatcac

SEQ ID NO: 762 - protein, 211 aa, synthetic construct
  REGION 1..211: note = Variant of 3'O-kinase
MAFTIGLTGGIAAGKSTVSAMMRELGLPVIDADEAARAVMRPGEEAYRQIVAKFGPGILRADGEIDRQKLGAIRFSDEQQRKVLNAIVGPAVLKKMLAEKEAHIRSGAKTVVLDIPLLFESGLTHWVDKVLVVYVDDDVQLRRLMARNGFTEEEALKRIRSQWPSAEKVKRADAVIDNNGTIEETRRQLLAILHQWDLLGKGGSGHHHHHH

SEQ ID NO: 763 - DNA, 633 bp, synthetic construct
  misc_feature 1..633: note = Variant of 3'O-kinase
  source 1..633: mol_type = other DNA
atggcgtttaccattggtttaacaggagggatcgcagcgggcaaatcgactgtgagtgccatgatgcgtgaactgggtctgccggtcatcgatgctgacgaggcagcacgcgccgttatgcgtccaggcgaagaagcttatcgccagattgtagctgcgttcggtccgggcattcttcgtgccgatggcgagatcgatcgccagaaactgggtgctatccgcttttcggacgaacaacaacgtaaggtgctgaatgcgattgtaggtcctgcagtcctgaagaagatgctcgctgagaaagaagctcatatcctttcaggcgccaagacggttgtgctggatatcccgctgctgttcgaatccggattgacccattgggtcgacaaagtgctcgtggtgtacgtcgatgatgatgttcagttacgccgccttatggcacgtaacgggtttactgaagaagaagctctgaagcgcattcgttcacagtggcccagtgcggagaaagttaaacgtgcagacgctgtcatcgacaataatggcacgattgaagaaacccgccgccagctgctggccattttacaccagtgggatctgctgggtaagggtggctccggccaccatcatcaccatcac

SEQ ID NO: 764 - protein, 211 aa, synthetic construct
  REGION 1..211: note = Variant of 3'O-kinase
MAFTIGLTGGIAAGKSTVSAMMRELGLPVIDADEAARAVMRPGEEAYRQIVAAFGPGILRADGEIDRQKLGAIRFSDEQQRKVLNAIVGPAVLKKMLAEKEAHILSGAKTVVLDIPLLFESGLTHWVDKVLVVYVDDDVQLRRLMARNGFTEEEALKRIRSQWPSAEKVKRADAVIDNNGTIEETRRQLLAILHQWDLLGKGGSGHHHHHH

SEQ ID NO: 765 - DNA, 633 bp, synthetic construct
  misc_feature 1..633: note = Variant of 3'O-kinase
  source 1..633: mol_type = other DNA
atggcgtttaccattggtttaacaggagggatcgcagcgggcaaatcgactgtgagtgccatgatgcgtgaactgggtctgccggtcatcgatgctgacgaggcagcacgcgccgttatgcgtccaggcgaagaagcttatcgccagattgtagctgcgttcggtccgggcattcttcgtgccgatggcgagatcgatcgccagaaactgggtgctatccgcttttcggacgaacaacaacgtaaggtgctgaatgcgattgtaggtcctgcagtcctgaagaagatgctcgctgagaaagaagctcatatccgctcaggcgccaagacggttgtgctggatatcccgctgctgttcgaatccggattgacccattgggtcgacaaagtgctcgtggtgtacgtcgatgatgatgttcagttacgccgccttatggcacgtaacgggtttactgaagaagaagctctgaagcgcattcgttcacagtggcccagtgcggagaaagttccgcgtgcagacgctgtcatcgacaataatggcacgattgaagaaacccgccgccagctgctggccattttacaccagtgggatctgctgggtaagggtggctccggccaccatcatcaccatcac

SEQ ID NO: 766 - protein, 211 aa, synthetic construct
  REGION 1..211: note = Variant of 3'O-kinase
MAFTIGLTGGIAAGKSTVSAMMRELGLPVIDADEAARAVMRPGEEAYRQIVAAFGPGILRADGEIDRQKLGAIRFSDEQQRKVLNAIVGPAVLKKMLAEKEAHIRSGAKTVVLDIPLLFESGLTHWVDKVLVVYVDDDVQLRRLMARNGFTEEEALKRIRSQWPSAEKVPRADAVIDNNGTIEETRRQLLAILHQWDLLGKGGSGHHHHHH

SEQ ID NO: 767 - DNA, 633 bp, synthetic construct
  misc_feature 1..633: note = Variant of 3'O-kinase
  source 1..633: mol_type = other DNA
atggcgtttaccattggtttaacaggagggatcgcagcgggcaaatcgactgtgagtgccatgatgcgtgaactgggtctgccggtcatcgatgctgacgaggcatcgcgcgccgttatgcgtccaggcgaagaagcttatcgccagattgtagctgcgttcggtccgggcattcttcgtgccgatggcgagatcgatcgccagaaactgggtgctatccgcttttcggacgaacaacaacgtaaggtgctgaatgcgattgtaggtcctgcagtcctgaagaagatgctcgctgagaaagaagctcatatccgctcaggcgccaagacggttgtgctggatatcccgctgctgttcgaatccggattgacccattgggtcgacaaagtgctcgtggtgtacgtcgatgatgatgttcagttacgccgccttatggcacgtaacgggtttactgaagaagaagctctgaagcgcattcgttcacagtggcccagtgcggagaaagttaaacgtgcagacgctgtcatcgacaataatggcacgattgaagaaacccgccgccagctgctggccattttacaccagtgggatctgctgggtaagggtggctccggccaccatcatcaccatcac

SEQ ID NO: 768 - protein, 211 aa, synthetic construct
  REGION 1..211: note = Variant of 3'O-kinase
MAFTIGLTGGIAAGKSTVSAMMRELGLPVIDADEASRAVMRPGEEAYRQIVAAFGPGILRADGEIDRQKLGAIRFSDEQQRKVLNAIVGPAVLKKMLAEKEAHIRSGAKTVVLDIPLLFESGLTHWVDKVLVVYVDDDVQLRRLMARNGFTEEEALKRIRSQWPSAEKVKRADAVIDNNGTIEETRRQLLAILHQWDLLGKGGSGHHHHHH

SEQ ID NO: 769 - DNA, 633 bp, synthetic construct
  misc_feature 1..633: note = Variant of 3'O-kinase
  source 1..633: mol_type = other DNA
atggcgtttaccattggtttaacaggagggatcgcagcgggcaaatcgactgtgagtgccatgatgcgtgaactgggtctgccggtcatcgatgctgacgaggcaggtcgcgccgttatgcgtccaggcgaagaagcttatcgccagattgtagctgcgttcggtccgggcattcttcgtgccgatggcgagatcgatcgccagaaactgggtgctatccgcttttcggacgaacaacaacgtaaggtgctgaatgcgattgtaggtcctgcagtcctgaagaagatgctcgctgagaaagaagctcatatccgctcaggcgccaagacggttgtgctggatatcccgctgctgttcgaatccggattgacccattgggtcgacaaagtgctcgtggtgtacgtcgatgatgatgttcagttacgccgccttatggcacgtaacgggtttactgaagaagaagctctgaagcgcattcgttcacagtggcccagtgcggagaaagttaaacgtgcagacgctgtcatcgacaataatggcacgattgaagaaacccgccgccagctgctggccattttacaccagtgggatctgctgggtaagggtggctccggccaccatcatcaccatcac

SEQ ID NO: 770 - protein, 211 aa, synthetic construct
  REGION 1..211: note = Variant of 3'O-kinase
MAFTIGLTGGIAAGKSTVSAMMRELGLPVIDADEAGRAVMRPGEEAYRQIVAAFGPGILRADGEIDRQKLGAIRFSDEQQRKVLNAIVGPAVLKKMLAEKEAHIRSGAKTVVLDIPLLFESGLTHWVDKVLVVYVDDDVQLRRLMARNGFTEEEALKRIRSQWPSAEKVKRADAVIDNNGTIEETRRQLLAILHQWDLLGKGGSGHHHHHH

SEQ ID NO: 771 - DNA, 633 bp, synthetic construct
  misc_feature 1..633: note = Variant of 3'O-kinase
  source 1..633: mol_type = other DNA
atggcgtttaccattggtttaacaggagggatcgcagcgggcaaatcgactgtgagtgccatgatgcgtgaactgggtctgccggtcatcgatgctgacgaggcagcacgcgccgttatgcgtccaggcgaagaagcttatcgccagattgtagctgcgttcggtccgggcattcttcgtgccgatggcgagatcgatcgccagaaactgggtgctatccgcttttcggacgaacaacaacgtaaggtgctgaatgcgattgtaggtcctgcagtcctgaagaagatgctcgctgagaaagaagctcatatccgctcaggcgccaagacggttgtgctggatatcccgctgctgttcgaatccggattgacccattgggtcgacaaagtgctcgtggtgtacgtcgatgatgatgttcagttacgccgccttatggcacgtaacgggtttactgaagaagaagctctgaagcgcattcgttcacagtggcccagtgcggagaaagttaaacgtgcagacgctgtcatcgacaataatggcacgattgaagaaacccgccgccagctgctggccattttacaccagtatgatctgctgggtaagggtggctccggccaccatcatcaccatcac

SEQ ID NO: 772 - protein, 211 aa, synthetic construct
  REGION 1..211: note = Variant of 3'O-kinase
MAFTIGLTGGIAAGKSTVSAMMRELGLPVIDADEAARAVMRPGEEAYRQIVAAFGPGILRADGEIDRQKLGAIRFSDEQQRKVLNAIVGPAVLKKMLAEKEAHIRSGAKTVVLDIPLLFESGLTHWVDKVLVVYVDDDVQLRRLMARNGFTEEEALKRIRSQWPSAEKVKRADAVIDNNGTIEETRRQLLAILHQYDLLGKGGSGHHHHHH

SEQ ID NO: 773 - DNA, 633 bp, synthetic construct
  misc_feature 1..633: note = Variant of 3'O-kinase
  source 1..633: mol_type = other DNA
atggcgtttaccattggtttaacaggagggatcgcagcgggcaaatcgactgtgagtgccatgatgcgtgaactgggtctgccggtcatcgatgctgacgaggcagcacgcgccgttatgcgtccaggcgaagaagcttcgcgccagattgtagctgcgttcggtccgggcattcttcgtgccgatggcgagatcgatcgccagaaactgggtgctatccgcttttcggacgaacaacaacgtaaggtgctgaatgcgattgtaggtcctgcagtcctgaagaagatgctcgctgagaaagaagctcatatccgctcaggcgccaagacggttgtgctggatatcccgctgctgttcgaatccggattgacccattgggtcgacaaagtgctcgtggtgtacgtcgatgatgatgttcagttacgccgccttatggcacgtaacgggtttactgaagaagaagctctgaagcgcattcgttcacagtggcccagtgcggagaaagttaaacgtgcagacgctgtcatcgacaataatggcacgattgaagaaacccgccgccagctgctggccattttacaccagtgggatctgctgggtaagggtggctccggccaccatcatcaccatcac

SEQ ID NO: 774 - protein, 211 aa, synthetic construct
  REGION 1..211: note = Variant of 3'O-kinase
MAFTIGLTGGIAAGKSTVSAMMRELGLPVIDADEAARAVMRPGEEASRQIVAAFGPGILRADGEIDRQKLGAIRFSDEQQRKVLNAIVGPAVLKKMLAEKEAHIRSGAKTVVLDIPLLFESGLTHWVDKVLVVYVDDDVQLRRLMARNGFTEEEALKRIRSQWPSAEKVKRADAVIDNNGTIEETRRQLLAILHQWDLLGKGGSGHHHHHH

SEQ ID NO: 775 - DNA, 633 bp, synthetic construct
  misc_feature 1..633: note = Variant of 3'O-kinase
  source 1..633: mol_type = other DNA
atggcgtttaccattggtttaacaggagggatcgcagcgggcaaatcgactgtgagtgccatgatgcgtgaactgggtctgccggtcatcgatgctgacgaggcagcacgcgccgttatgcgtccaggcgaagaagcttatcgccagattgtagctgcgttcggtccgggcattcttcgtgccgatggcgagatcgatcgccagaaactgggtgctatccgcttttcggacgaacaacaacgtaaggtgctgaatgcgattgtaggtcctgcagtcctgaagaagatgctcgctgagaaagaagctcatatccgctcaggcgccaagacggttgtgctggatatcccgctgctgttcgaatccggattgacccattgggtcgacaaagtgctcgtggtgtacgtcgatgatgatgttcagttacgccgccttatggcacgtaacgggtttactgaagaagaagctctgaagcgcattcgttcacagtggcccagtgcggagaaagttaaacgtgcagacgctgtcatcgacaataatggcacgattgaagaaacccgccgccagctgctggccattttacacccgtgggatctgctgggtaagggtggctccggccaccatcatcaccatcac

SEQ ID NO: 776 - protein, 211 aa, synthetic construct
  REGION 1..211: note = Variant of 3'O-kinase
MAFTIGLTGGIAAGKSTVSAMMRELGLPVIDADEAARAVMRPGEEAYRQIVAAFGPGILRADGEIDRQKLGAIRFSDEQQRKVLNAIVGPAVLKKMLAEKEAHIRSGAKTVVLDIPLLFESGLTHWVDKVLVVYVDDDVQLRRLMARNGFTEEEALKRIRSQWPSAEKVKRADAVIDNNGTIEETRRQLLAILHPWDLLGKGGSGHHHHHH

SEQ ID NO: 777 - DNA, 633 bp, synthetic construct
  misc_feature 1..633: note = Variant of 3'O-kinase
  source 1..633: mol_type = other DNA
atggcgtttaccattggtttaacaggagggatcgcagcgggcaaatcgactgtgagtgccatgatgcgtgaactgggtctgccggtcatcgatgctgacgaggcagcacgcgccgttatgcgtccaggcgaagaagcttatcgccagattgtagctgcgttcggtccgggcattcttcgtgccgatggcgagatcgatcgccagaaactgggtgctatccgcttttcggacgaacaacaacgtaaggtgctgaatgcgattgtaggtcctgcagtcctgaagaagatgctcgctgagaaagaagctcatatccgctcaggcgccaagacggttgtgctggatatcccgctgctgttcgaatccggattgacccattgggtcgacaaagtgctcgtggtgtacgtcgatgatgatgttcagttacgccgccttatggcacgtaacgggtttactgaagaagaagctctgaagcgcattcgttcacagtggcccagtgcggagaaagttaaacgtgcatatgctgtcatcgacaataatggcacgattgaagaaacccgccgccagctgctggccattttacaccagtgggatctgctgggtaagggtggctccggccaccatcatcaccatcac

SEQ ID NO: 778 - protein, 211 aa, synthetic construct
  REGION 1..211: note = Variant of 3'O-kinase
MAFTIGLTGGIAAGKSTVSAMMRELGLPVIDADEAARAVMRPGEEAYRQIVAAFGPGILRADGEIDRQKLGAIRFSDEQQRKVLNAIVGPAVLKKMLAEKEAHIRSGAKTVVLDIPLLFESGLTHWVDKVLVVYVDDDVQLRRLMARNGFTEEEALKRIRSQWPSAEKVKRAYAVIDNNGTIEETRRQLLAILHQWDLLGKGGSGHHHHHH

SEQ ID NO: 779 - DNA, 633 bp, synthetic construct
  misc_feature 1..633: note = Variant of 3'O-kinase
  source 1..633: mol_type = other DNA
atggcgtttaccattggtttaacaggagggatcgcagcgggcaaatcgactgtgagtgccatgatgcgtgaactgggtctgccggtcatcgatgctgacgaggcagcacgcgccgttatgcgtccaggcgaagaagcttatcgccagattgtagctgagttcggtccgggcattcttcgtgccgatggcgagatcgatcgccagaaactgggtgctatccgcttttcggacgaacaacaacgtaaggtgctgaatgcgattgtaggtcctgcagtcctgaagaagatgctcgctgagaaagaagctcatatccgctcaggcgccaagacggttgtgctggatatcccgctgctgttcgaatccggattgacccattgggtcgacaaagtgctcgtggtgtacgtcgatgatgatgttcagttacgccgccttatggcacgtaacgggtttactgaagaagaagctctgaagcgcattcgttcacagtggcccagtgcggagaaagttaaacgtgcagacgctgtcatcgacaataatggcacgattgaagaaacccgccgccagctgctggccattttacaccagtgggatctgctgggtaagggtggctccggccaccatcatcaccatcac

SEQ ID NO: 780 - protein, 211 aa, synthetic construct
  REGION 1..211: note = Variant of 3'O-kinase
MAFTIGLTGGIAAGKSTVSAMMRELGLPVIDADEAARAVMRPGEEAYRQIVAEFGPGILRADGEIDRQKLGAIRFSDEQQRKVLNAIVGPAVLKKMLAEKEAHIRSGAKTVVLDIPLLFESGLTHWVDKVLVVYVDDDVQLRRLMARNGFTEEEALKRIRSQWPSAEKVKRADAVIDNNGTIEETRRQLLAILHQWDLLGKGGSGHHHHHH

SEQ ID NO: 781 - DNA, 633 bp, synthetic construct
  misc_feature 1..633: note = Variant of 3'O-kinase
  source 1..633: mol_type = other DNA
atggcgtttaccattggtttaacaggagggatcgcagcgggcaaatcgactgtgagtgccatgatgcgtgaactgggtctgccggtcatcgatgctgacgaggcagcacgcgccgttatgcgtccaggcgaagaagcttatcgccagattgtagctgcgttcggtccgggcattcttcgtgccgatggcgagatcgatcgccagaaactgggtgctatccgcttttcggacgaacaacaacgtaaggtgctgaatgcgattgtaggtcctgcagtcctgaagaagatgctcgctgagaaagaagctcatatccgctcaggcgccaagacggttgtgctggatatcccgctgctgttcgaatccggattgacccattgggtcgacaaagtgctcgtggtgtacgtcgatgatgatgttcagttacgccgccttatggcacgtaacgggtttactgaagaagaagctctgaagcgcattcgttcacagtggcccagtgcggagaaagttaaacgtgcagacgctgtcatcgacaataatggcacgattgaagaaacccgccgccagctgctggccattttacaccagtgggatctgtgtggtaagggtggctccggccaccatcatcaccatcac

SEQ ID NO: 782 - protein, 211 aa, synthetic construct
  REGION 1..211: note = Variant of 3'O-kinase
MAFTIGLTGGIAAGKSTVSAMMRELGLPVIDADEAARAVMRPGEEAYRQIVAAFGPGILRADGEIDRQKLGAIRFSDEQQRKVLNAIVGPAVLKKMLAEKEAHIRSGAKTVVLDIPLLFESGLTHWVDKVLVVYVDDDVQLRRLMARNGFTEEEALKRIRSQWPSAEKVKRADAVIDNNGTIEETRRQLLAILHQWDLCGKGGSGHHHHHH

SEQ ID NO: 783 - DNA, 633 bp, synthetic construct
  misc_feature 1..633: note = Variant of 3'O-kinase
  source 1..633: mol_type = other DNA
atggcgtttaccattggtttaacaggagggatcgcagcgggcaaatcgactgtgagtgccatgatgcgtgaactgggtctgccggtcatcgatgctgacgaggcagcacgcgccgttatgcgtccaggcgaagaagcttatcgccagattgtagctgcgttcggtccgggcattcttcgtgccgatggcgagatcgatcgccagaaactgggtgctatccgcttttcggacgaaggtcaacgtaaggtgctgaatgcgattgtaggtcctgcagtcctgaagaagatgctcgctgagaaagaagctcatatccgctcaggcgccaagacggttgtgctggatatcccgctgctgttcgaatccggattgacccattgggtcgacaaagtgctcgtggtgtacgtcgatgatgatgttcagttacgccgccttatggcacgtaacgggtttactgaagaagaagctctgaagcgcattcgttcacagtggcccagtgcggagaaagttaaacgtgcagacgctgtcatcgacaataatggcacgattgaagaaacccgccgccagctgctggccattttacaccagtgggatctgctgggtaagggtggctccggccaccatcatcaccatcac

SEQ ID NO: 784 - protein, 211 aa, synthetic construct
  REGION 1..211: note = Variant of 3'O-kinase
MAFTIGLTGGIAAGKSTVSAMMRELGLPVIDADEAARAVMRPGEEAYRQIVAAFGPGILRADGEIDRQKLGAIRFSDEGQRKVLNAIVGPAVLKKMLAEKEAHIRSGAKTVVLDIPLLFESGLTHWVDKVLVVYVDDDVQLRRLMARNGFTEEEALKRIRSQWPSAEKVKRADAVIDNNGTIEETRRQLLAILHQWDLLGKGGSGHHHHHH

SEQ ID NO: 785 - DNA, 633 bp, synthetic construct
  misc_feature 1..633: note = Variant of 3'O-kinase
  source 1..633: mol_type = other DNA
atggcgtttaccattggtttaacaggagggatcgcagcgggcaaatcgactgtgagtgccatgatgcgtgaactgggtctgccggtcatcgatgctgacgaggcagcacgcgccgttatgcgtccaggcgaagaagcttatcgctgtattgtagctgcgttcggtccgggcattcttcgtgccgatggcgagatcgatcgccagaaactgggtgctatccgcttttcggacgaacaacaacgtaaggtgctgaatgcgattgtaggtcctgcagtcctgaagaagatgctcgctgagaaagaagctcatatccgctcaggcgccaagacggttgtgctggatatcccgctgctgttcgaatccggattgacccattgggtcgacaaagtgctcgtggtgtacgtcgatgatgatgttcagttacgccgccttatggcacgtaacgggtttactgaagaagaagctctgaagcgcattcgttcacagtggcccagtgcggagaaagttaaacgtgcagacgctgtcatcgacaataatggcacgattgaagaaacccgccgccagctgctggccattttacaccagtgggatctgctgggtaagggtggctccggccaccatcatcaccatcac

SEQ ID NO: 786 - protein, 211 aa, synthetic construct
  REGION 1..211: note = Variant of 3'O-kinase
MAFTIGLTGGIAAGKSTVSAMMRELGLPVIDADEAARAVMRPGEEAYRCIVAAFGPGILRADGEIDRQKLGAIRFSDEQQRKVLNAIVGPAVLKKMLAEKEAHIRSGAKTVVLDIPLLFESGLTHWVDKVLVVYVDDDVQLRRLMARNGFTEEEALKRIRSQWPSAEKVKRADAVIDNNGTIEETRRQLLAILHQWDLLGKGGSGHHHHHH

SEQ ID NO: 787 - DNA, 633 bp, synthetic construct
  misc_feature 1..633: note = Variant of 3'O-kinase
  source 1..633: mol_type = other DNA
atggcgtttaccattggtttaacaggagggatcgcagcgggcaaatcgactgtgagtgccatgatgcgtgaactgggtctggatgtcatcgatgctgacgaggcagcacgcgccgttatgcgtccaggcgaagaagcttatcgccagattgtagctgcgttcggtccgggcattcttcgtgccgatggcgagatcgatcgccagaaactgggtgctatccgcttttcggacgaacaacaacgtaaggtgctgaatgcgattgtaggtcctgcagtcctgaagaagatgctcgctgagaaagaagctcatatccgctcaggcgccaagacggttgtgctggatatcccgctgctgttcgaatccggattgacccattgggtcgacaaagtgctcgtggtgtacgtcgatgatgatgttcagttacgccgccttatggcacgtaacgggtttactgaagaagaagctctgaagcgcattcgttcacagtggcccagtgcggagaaagttaaacgtgcagacgctgtcatcgacaataatggcacgattgaagaaacccgccgccagctgctggccattttacaccagtgggatctgctgggtaagggtggctccggccaccatcatcaccatcac

SEQ ID NO: 788 - protein, 211 aa, synthetic construct
  REGION 1..211: note = Variant of 3'O-kinase
MAFTIGLTGGIAAGKSTVSAMMRELGLDVIDADEAARAVMRPGEEAYRQIVAAFGPGILRADGEIDRQKLGAIRFSDEQQRKVLNAIVGPAVLKKMLAEKEAHIRSGAKTVVLDIPLLFESGLTHWVDKVLVVYVDDDVQLRRLMARNGFTEEEALKRIRSQWPSAEKVKRADAVIDNNGTIEETRRQLLAILHQWDLLGKGGSGHHHHHH

SEQ ID NO: 789 - DNA, 633 bp, synthetic construct
  misc_feature 1..633: note = Variant of 3'O-kinase
  source 1..633: mol_type = other DNA
atggcgtttaccattggtttaacaggagggatcgcagcgggcaaatcgactgtgagtgccatgatgcgtgaactgggtctgccggtcatcgatgctgacgaggcagcacgcgccgttatgcgtccaggcgaagaagcttatcgccagattgtagctgcgttcggtccgggcattcttcgtgccgatggcgagatcgatcgccagaaactgggtgctatccgcttttcggacgaacaacaacgtaaggtgctgaatgcgattgtaggtcctgcagtcctgaagaagatgctcgctgagaaagaagctcatatccgctcaggcgccaagacggttgtgctggatatcccgctgctgttcgaatccggattgacccattgggtcgacaaagtgctcgtggtgtacgtcgatgatgatgttcagttacgccgccttatggcacgtaacgggtttactgaagaagaagctctgaagcgcattcgttcacagtggcccagtgcggagaaagttaaacgtgcagacgctgtcatcgacaataatggcacgattgaagaaacccgccgccagctgctggccattttacaccagtgggatctgctgggtaagggtggctgtggccaccatcatcaccatcac

SEQ ID NO: 790 - protein, 211 aa, synthetic construct
  REGION 1..211: note = Variant of 3'O-kinase
MAFTIGLTGGIAAGKSTVSAMMRELGLPVIDADEAARAVMRPGEEAYRQIVAAFGPGILRADGEIDRQKLGAIRFSDEQQRKVLNAIVGPAVLKKMLAEKEAHIRSGAKTVVLDIPLLFESGLTHWVDKVLVVYVDDDVQLRRLMARNGFTEEEALKRIRSQWPSAEKVKRADAVIDNNGTIEETRRQLLAILHQWDLLGKGGCGHHHHHH

SEQ ID NO: 791 - DNA, 633 bp, synthetic construct
  misc_feature 1..633: note = Variant of 3'O-kinase
  source 1..633: mol_type = other DNA
atggcgtttaccattggtttaacaggagggatcgcagcgggcaaatcgactgtgagtgccatgatgcgtgaactgggtctgccggtcatcgatgctgacgaggcagcacgcgccgttatgcgtccaggcgaagaagcttatcgccagattgtagctgcgttcggtccgggcattcttcgtgccgatggcgagatcgatcgccagaaactgggtgctatccgcttttcggacgaacaacaacgtaaggtgctgaatgcgattgtaggtcctgcagtcctgaagaagatgctcgctgagaaagaagctcatatccgctcaggcgcctctacggttgtgctggatatcccgctgctgttcgaatccggattgacccattgggtcgacaaagtgctcgtggtgtacgtcgatgatgatgttcagttacgccgccttatggcacgtaacgggtttactgaagaagaagctctgaagcgcattcgttcacagtggcccagtgcggagaaagttaaacgtgcagacgctgtcatcgacaataatggcacgattgaagaaacccgccgccagctgctggccattttacaccagtgggatctgctgggtaagggtggctccggccaccatcatcaccatcac

SEQ ID NO: 792 - protein, 211 aa, synthetic construct
  REGION 1..211: note = Variant of 3'O-kinase
MAFTIGLTGGIAAGKSTVSAMMRELGLPVIDADEAARAVMRPGEEAYRQIVAAFGPGILRADGEIDRQKLGAIRFSDEQQRKVLNAIVGPAVLKKMLAEKEAHIRSGASTVVLDIPLLFESGLTHWVDKVLVVYVDDDVQLRRLMARNGFTEEEALKRIRSQWPSAEKVKRADAVIDNNGTIEETRRQLLAILHQWDLLGKGGSGHHHHHH

SEQ ID NO: 793 - DNA, 633 bp, synthetic construct
  misc_feature 1..633: note = Variant of 3'O-kinase
  source 1..633: mol_type = other DNA
atggcgtttaccattggtttaacaggagggatcgcagcgggcaaatcgactgtgagtgccatgatgcgtgaactgggtctgccggtcatcgatgctgacgaggcagcacgcgccgttatgcgtccaggcgaagaagcttatcgccagattgtagctgcgttcggtccgggcattcttcgtgccgatggcgagatcgatcgccagaaactgggtgctatccgcttttcggacgaacaacaacgtaaggtgctgaatgcgattgtaggtcctgcagtcctgaagaagatgctcgctgagaaagaagctcatatccgctcaggcgccaagacggttgtgctggatatcccgctgctgttcgaatccattttgacccattgggtcgacaaagtgctcgtggtgtacgtcgatgatgatgttcagttacgccgccttatggcacgtaacgggtttactgaagaagaagctctgaagcgcattcgttcacagtggcccagtgcggagaaagttaaacgtgcagacgctgtcatcgacaataatggcacgattgaagaaacccgccgccagctgctggccattttacaccagtgggatctgctgggtaagggtggctccggccaccatcatcaccatcac

SEQ ID NO: 794 - protein, 211 aa, synthetic construct
  REGION 1..211: note = Variant of 3'O-kinase
MAFTIGLTGGIAAGKSTVSAMMRELGLPVIDADEAARAVMRPGEEAYRQIVAAFGPGILRADGEIDRQKLGAIRFSDEQQRKVLNAIVGPAVLKKMLAEKEAHIRSGAKTVVLDIPLLFESILTHWVDKVLVVYVDDDVQLRRLMARNGFTEEEALKRIRSQWPSAEKVKRADAVIDNNGTIEETRRQLLAILHQWDLLGKGGSGHHHHHH

SEQ ID NO: 795 - DNA, 633 bp, synthetic construct
  misc_feature 1..633: note = Variant of 3'O-kinase
  source 1..633: mol_type = other DNA
atggcgtttaccattggtttaacaggagggatcgcagcgggcaaatcgactgtgagtgccatgatgcgtgaaatgggtctgccggtcatcgatgctgacgaggcagcacgcgccgttatgcgtccaggcgaagaagcttatcgccagattgtagctgcgttcggtccgggcattcttcgtgccgatggcgagatcgatcgccagaaactgggtgctatccgcttttcggacgaacaacaacgtaaggtgctgaatgcgattgtaggtcctgcagtcctgaagaagatgctcgctgagaaagaagctcatatccgctcaggcgccaagacggttgtgctggatatcccgctgctgttcgaatccggattgacccattgggtcgacaaagtgctcgtggtgtacgtcgatgatgatgttcagttacgccgccttatggcacgtaacgggtttactgaagaagaagctctgaagcgcattcgttcacagtggcccagtgcggagaaagttaaacgtgcagacgctgtcatcgacaataatggcacgattgaagaaacccgccgccagctgctggccattttacaccagtgggatctgctgggtaagggtggctccggccaccatcatcaccatcac

SEQ ID NO: 796 - protein, 211 aa, synthetic construct
  REGION 1..211: note = Variant of 3'O-kinase
MAFTIGLTGGIAAGKSTVSAMMREMGLPVIDADEAARAVMRPGEEAYRQIVAAFGPGILRADGEIDRQKLGAIRFSDEQQRKVLNAIVGPAVLKKMLAEKEAHIRSGAKTVVLDIPLLFESGLTHWVDKVLVVYVDDDVQLRRLMARNGFTEEEALKRIRSQWPSAEKVKRADAVIDNNGTIEETRRQLLAILHQWDLLGKGGSGHHHHHH

SEQ ID NO: 797 - DNA, 633 bp, synthetic construct
  misc_feature 1..633: note = Variant of 3'O-kinase
  source 1..633: mol_type = other DNA
atggcgtttaccattggtttaacaggagggatcgcagcgggcaaatcgactgtgagtgccatgatgcgtgaactgggtctgccggtcatcgatgctgacgaggcagcacgcgccgttatgcgtccaggcgaagaagcttatcgccagattgtagctgcgttcggtccgggcattcttcgtgccgatggcgagatcgatcgccagaaactgggtgctatccgcttttcggacgaacaacaacgtaaggtgctgaatgcgattgtaggtcctgcagtcctgaagaagatgctcgctgagaaagaagctcatatccgctcaggcgccaagacggttgtgctggatatcccgctgctgttcgaatccggattgacccattgggtcgacaaagtgctcgtggtgtacgtcgatgatgatgttcagttacgccgccttatggcacgtaacgggtttactgaagaagaagctctgaagcgcattcgttcacagtggcccagtgcggagaaagttaaatcggcagacgctgtcatcgacaataatggcacgattgaagaaacccgccgccagctgctggccattttacaccagtgggatctgctgggtaagggtggctccggccaccatcatcaccatcac

SEQ ID NO: 798 - protein, 211 aa, synthetic construct
  REGION 1..211: note = Variant of 3'O-kinase
MAFTIGLTGGIAAGKSTVSAMMRELGLPVIDADEAARAVMRPGEEAYRQIVAAFGPGILRADGEIDRQKLGAIRFSDEQQRKVLNAIVGPAVLKKMLAEKEAHIRSGAKTVVLDIPLLFESGLTHWVDKVLVVYVDDDVQLRRLMARNGFTEEEALKRIRSQWPSAEKVKSADAVIDNNGTIEETRRQLLAILHQWDLLGKGGSGHHHHHH

SEQ ID NO: 799 - DNA, 633 bp, synthetic construct
  misc_feature 1..633: note = Variant of 3'O-kinase
  source 1..633: mol_type = other DNA
atggcgtttaccattggtttaacaggagggatcgcagcgggcaaatcgactgtgagtgccatgatgcgtgaactgggtctgccggtcatcgatgctgacgaggcagcacgcgccgttatgcgtccaggcgaagaagcttatcgccagattgtagctgcgttcggtccgggcactcttcgtgccgatggcgagatcgatcgccagaaactgggtgctatccgcttttcggacgaacaacaacgtaaggtgctgaatgcgattgtaggtcctgcagtcctgaagaagatgctcgctgagaaagaagctcatatccgctcaggcgccaagacggttgtgctggatatcccgctgctgttcgaatccggattgacccattgggtcgacaaagtgctcgtggtgtacgtcgatgatgatgttcagttacgccgccttatggcacgtaacgggtttactgaagaagaagctctgaagcgcattcgttcacagtggcccagtgcggagaaagttaaacgtgcagacgctgtcatcgacaataatggcacgattgaagaaacccgccgccagctgctggccattttacaccagtgggatctgctgggtaagggtggctccggccaccatcatcaccatcac

SEQ ID NO: 800 - protein, 211 aa, synthetic construct
  REGION 1..211: note = Variant of 3'O-kinase
MAFTIGLTGGIAAGKSTVSAMMRELGLPVIDADEAARAVMRPGEEAYRQIVAAFGPGTLRADGEIDRQKLGAIRFSDEQQRKVLNAIVGPAVLKKMLAEKEAHIRSGAKTVVLDIPLLFESGLTHWVDKVLVVYVDDDVQLRRLMARNGFTEEEALKRIRSQWPSAEKVKRADAVIDNNGTIEETRRQLLAILHQWDLLGKGGSGHHHHHH

SEQ ID NO: 801 - DNA, 633 bp, synthetic construct
  misc_feature 1..633: note = Variant of 3'O-kinase
  source 1..633: mol_type = other DNA
atggcgtttaccattggtttaacaggagggatcgcagcgggcaaatcgactgtgagtgccatgatgcgtgaactgggtctgccggtcatcgatgctgacgaggcagcacgcgccgttatgcgtccaggcgaagaagcttatcgccagattgtagctgcgttcggtccgggcattcttcgtgccgatggcgagatcgatcgccagaaactgggtgctatccgcttttcggacgaacaacaacgtaaggtgctgaatgcgattgtaggtcctgcagtcctgaagaagatgctcgctgagaaagaagctcatatccgctcaggcgccaagacggttgtgctggatatcccgctgctgttcgaatccggattgacccattgggtcgacaaagtgctcgtggtgtacgtcgatgatgatgttcagttacgccgccttatggcacgtaacgggtttactgaagaagaagctctgaagcgcattcgttcacagtggcccagtgcggagaaagttaaacgtgcagacgctgtcatcgacaataatggcacgattgaagaaacccgccgccagctgctggccattttacaccagtgggatctgctgggtagtggtggctccggccaccatcatcaccatcac

SEQ ID NO: 802 - protein, 211 aa, synthetic construct
  REGION 1..211: note = Variant of 3'O-kinase
MAFTIGLTGGIAAGKSTVSAMMRELGLPVIDADEAARAVMRPGEEAYRQIVAAFGPGILRADGEIDRQKLGAIRFSDEQQRKVLNAIVGPAVLKKMLAEKEAHIRSGAKTVVLDIPLLFESGLTHWVDKVLVVYVDDDVQLRRLMARNGFTEEEALKRIRSQWPSAEKVKRADAVIDNNGTIEETRRQLLAILHQWDLLGSGGSGHHHHHH

SEQ ID NO: 803 - DNA, 633 bp, synthetic construct
  misc_feature 1..633: note = Variant of 3'O-kinase
  source 1..633: mol_type = other DNA
atggcgtttaccattggtttaacaggagggatcgcagcgggcaaatcgactgtgagtgccatgatgcgtgaactgggtctgccggtcatcgatgctgacgaggcagcacgcgccgttatgcgtccaggcgcggaagcttatcgccagattgtagctgcgttcggtccgggcattcttcgtgccgatggcgagatcgatcgccagaaactgggtgctatccgcttttcggacgaacaacaacgtaaggtgctgaatgcgattgtaggtcctgcagtcctgaagaagatgctcgctgagaaagaagctcatatccgctcaggcgccaagacggttgtgctggatatcccgctgctgttcgaatccggattgacccattgggtcgacaaagtgctcgtggtgtacgtcgatgatgatgttcagttacgccgccttatggcacgtaacgggtttactgaagaagaagctctgaagcgcattcgttcacagtggcccagtgcggagaaagttaaacgtgcagacgctgtcatcgacaataatggcacgattgaagaaacccgccgccagctgctggccattttacaccagtgggatctgctgggtaagggtggctccggccaccatcatcaccatcac

SEQ ID NO: 804 - protein, 211 aa, synthetic construct
  REGION 1..211: note = Variant of 3'O-kinase
MAFTIGLTGGIAAGKSTVSAMMRELGLPVIDADEAARAVMRPGAEAYRQIVAAFGPGILRADGEIDRQKLGAIRFSDEQQRKVLNAIVGPAVLKKMLAEKEAHIRSGAKTVVLDIPLLFESGLTHWVDKVLVVYVDDDVQLRRLMARNGFTEEEALKRIRSQWPSAEKVKRADAVIDNNGTIEETRRQLLAILHQWDLLGKGGSGHHHHHH

SEQ ID NO: 805 - DNA, 633 bp, synthetic construct
  misc_feature 1..633: note = Variant of 3'O-kinase
  source 1..633: mol_type = other DNA
atggcgtttaccattggtttaacaggagggatcgcagcgggcaaatcgactgtgagtgccatgatgcgtgaactgggtctgccggtcatcgatgctgacgaggcagcacgcgccgttatgcgtccaggcgaagaagcttatcgccagattgtagctgcgttcggtccgggcattcttcgtgccgatggcgagatcgatcgccagaaactgggtgctatccgcttttcggacgaacaacaacgtaaggtgctgaatgcgattgtaggtcctgcagtcctgaagaagatgctcgctgagaaagaagctcatatccgctcaggcgccaagacggttgtgctggatatcccgctgctgttcgaatccggattgacccattgggtcgacaaagtgctcgtggtgtacgtcgatgatgatgttcagttacgccgccttatggcacgtaacgggtttactgaagaagaagctctgaagcgcattcgttcacagtggcccagtgcgacgaaagttaaacgtgcagacgctgtcatcgacaataatggcacgattgaagaaacccgccgccagctgctggccattttacaccagtgggatctgctgggtaagggtggctccggccaccatcatcaccatcac

SEQ ID NO: 806 - protein, 211 aa, synthetic construct
  REGION 1..211: note = Variant of 3'O-kinase
MAFTIGLTGGIAAGKSTVSAMMRELGLPVIDADEAARAVMRPGEEAYRQIVAAFGPGILRADGEIDRQKLGAIRFSDEQQRKVLNAIVGPAVLKKMLAEKEAHIRSGAKTVVLDIPLLFESGLTHWVDKVLVVYVDDDVQLRRLMARNGFTEEEALKRIRSQWPSATKVKRADAVIDNNGTIEETRRQLLAILHQWDLLGKGGSGHHHHHH

SEQ ID NO: 807 - DNA, 633 bp, synthetic construct
  misc_feature 1..633: note = Variant of 3'O-kinase
  source 1..633: mol_type = other DNA
atggcgtttaccattggtttaacaggagggatcgcagcgggcaaatcgactgtgagtgccatgatgcgtgaactgggtctgccggtcatcgatgctgacgaggcagcacgcgccgttatgcgtccaggcgaagaagcttatcgccagattgtagcttttttcggtccgggcattcttcgtgccgatggcgagatcgatcgccagaaactgggtgctatccgcttttcggacgaacaacaacgtaaggtgctgaatgcgattgtaggtcctgcagtcctgaagaagatgctcgctgagaaagaagctcatatccgctcaggcgccaagacggttgtgctggatatcccgctgctgttcgaatccggattgacccattgggtcgacaaagtgctcgtggtgtacgtcgatgatgatgttcagttacgccgccttatggcacgtaacgggtttactgaagaagaagctctgaagcgcattcgttcacagtggcccagtgcggagaaagttaaacgtgcagacgctgtcatcgacaataatggcacgattgaagaaacccgccgccagctgctggccattttacaccagtgggatctgctgggtaagggtggctccggccaccatcatcaccatcac

SEQ ID NO: 808 - protein, 211 aa, synthetic construct
  REGION 1..211: note = Variant of 3'O-kinase
MAFTIGLTGGIAAGKSTVSAMMRELGLPVIDADEAARAVMRPGEEAYRQIVAFFGPGILRADGEIDRQKLGAIRFSDEQQRKVLNAIVGPAVLKKMLAEKEAHIRSGAKTVVLDIPLLFESGLTHWVDKVLVVYVDDDVQLRRLMARNGFTEEEALKRIRSQWPSAEKVKRADAVIDNNGTIEETRRQLLAILHQWDLLGKGGSGHHHHHH

SEQ ID NO: 809 - DNA, 633 bp, synthetic construct
  misc_feature 1..633: note = Variant of 3'O-kinase
  source 1..633: mol_type = other DNA
atggcgcctaccattggtttaacaggagggatcgcagcgggcaaatcgactgtgagtgccatgatgcgtgaactgggtctgccggtcatcgatgctgacgaggcagcacgcgccgttatgcgtccaggcgaagaagcttatcgccagattgtagctgcgttcggtccgggcattcttcgtgccgatggcgagatcgatcgccagaaactgggtgctatccgcttttcggacgaacaacaacgtaaggtgctgaatgcgattgtaggtcctgcagtcctgaagaagatgctcgctgagaaagaagctcatatccgctcaggcgccaagacggttgtgctggatatcccgctgctgttcgaatccggattgacccattgggtcgacaaagtgctcgtggtgtacgtcgatgatgatgttcagttacgccgccttatggcacgtaacgggtttactgaagaagaagctctgaagcgcattcgttcacagtggcccagtgcggagaaagttaaacgtgcagacgctgtcatcgacaataatggcacgattgaagaaacccgccgccagctgctggccattttacaccagtgggatctgctgggtaagggtggctccggccaccatcatcaccatcac

SEQ ID NO: 810 - protein, 211 aa, synthetic construct
  REGION 1..211: note = Variant of 3'O-kinase
MAPTIGLTGGIAAGKSTVSAMMRELGLPVIDADEAARAVMRPGEEAYRQIVAAFGPGILRADGEIDRQKLGAIRFSDEQQRKVLNAIVGPAVLKKMLAEKEAHIRSGAKTVVLDIPLLFESGLTHWVDKVLVVYVDDDVQLRRLMARNGFTEEEALKRIRSQWPSAEKVKRADAVIDNNGTIEETRRQLLAILHQWDLLGKGGSGHHHHHH

SEQ ID NO: 811 - DNA, 633 bp, synthetic construct
  misc_feature 1..633: note = Variant of 3'O-kinase
  source 1..633: mol_type = other DNA
atggcgtttaccattggtttaacaggagggatcgcagcgggcaaatcgactgtgagtgccatgatgcgtgaactgggtctgccggtcatcgatgctgacgaggcagcacgcgccgttatgcgtccaggcgaagaagcttatcgccagattgtagctgcgttcggtccgggcattcttcgtgccgatggcgagatcgatcgccagaaactgggtgctatccgcttttcggacgaacaacaacgtaaggtgctgaatgcgattgtaggtcctgcagtcctggcgaagatgctcgctgagaaagaagctcatatccgctcaggcgccaagacggttgtgctggatatcccgctgctgttcgaatccggattgacccattgggtcgacaaagtgctcgtggtgtacgtcgatgatgatgttcagttacgccgccttatggcacgtaacgggtttactgaagaagaagctctgaagcgcattcgttcacagtggcccagtgcggagaaagttaaacgtgcagacgctgtcatcgacaataatggcacgattgaagaaacccgccgccagctgctggccattttacaccagtgggatctgctgggtaagggtggctccggccaccatcatcaccatcac

SEQ ID NO: 812 - protein, 211 aa, synthetic construct
  REGION 1..211: note = Variant of 3'O-kinase
MAFTIGLTGGIAAGKSTVSAMMRELGLPVIDADEAARAVMRPGEEAYRQIVAAFGPGILRADGEIDRQKLGAIRFSDEQQRKVLNAIVGPAVLAKMLAEKEAHIRSGAKTVVLDIPLLFESGLTHWVDKVLVVYVDDDVQLRRLMARNGFTEEEALKRIRSQWPSAEKVKRADAVIDNNGTIEETRRQLLAILHQWDLLGKGGSGHHHHHH

SEQ ID NO: 813 - DNA, 633 bp, synthetic construct
  misc_feature 1..633: note = Variant of 3'O-kinase
  source 1..633: mol_type = other DNA
atggcgtttaccattggtttaacaggagggatcgcagcgggcaaatcgactgtgagtgccatgatgcgtgaactgggtctgccggtcatcgatgctgacgaggcagcacgcgccgttatgcgtccaggcgaagaagcttatcgccagtctgtagctgcgttcggtccgggcattcttcgtgccgatggcgagatcgatcgccagaaactgggtgctatccgcttttcggacgaacaacaacgtaaggtgctgaatgcgattgtaggtcctgcagtcctgaagaagatgctcgctgagaaagaagctcatatccgctcaggcgccaagacggttgtgctggatatcccgctgctgttcgaatccggattgacccattgggtcgacaaagtgctcgtggtgtacgtcgatgatgatgttcagttacgccgccttatggcacgtaacgggtttactgaagaagaagctctgaagcgcattcgttcacagtggcccagtgcggagaaagttaaacgtgcagacgctgtcatcgacaataatggcacgattgaagaaacccgccgccagctgctggccattttacaccagtgggatctgctgggtaagggtggctccggccaccatcatcaccatcac

SEQ ID NO: 814 - protein, 211 aa, synthetic construct
  REGION 1..211: note = Variant of 3'O-kinase
MAFTIGLTGGIAAGKSTVSAMMRELGLPVIDADEAARAVMRPGEEAYRQSVAAFGPGILRADGEIDRQKLGAIRFSDEQQRKVLNAIVGPAVLKKMLAEKEAHIRSGAKTVVLDIPLLFESGLTHWVDKVLVVYVDDDVQLRRLMARNGFTEEEALKRIRSQWPSAEKVKRADAVIDNNGTIEETRRQLLAILHQWDLLGKGGSGHHHHHH

SEQ ID NO: 815 - DNA, 633 bp, synthetic construct
  misc_feature 1..633: note = Variant of 3'O-kinase
  source 1..633: mol_type = other DNA
atggcgtttaccattggtttaacaggagggatcgcagcgggcaaatcgactgtgagtgccatgatgcgtgaactgggtctgccggtcatcgatgctgacgaggcagcacgcgccgttatgcgtccaggcgaagaagcttatcgccagattgtagctgcgttcggtccgggcattagtcgtgccgatggcgagatcgatcgccagaaactgggtgctatccgcttttcggacgaacaacaacgtaaggtgctgaatgcgattgtaggtcctgcagtcctgaagaagatgctcgctgagaaagaagctcatatccgctcaggcgccaagacggttgtgctggatatcccgctgctgttcgaatccggattgacccattgggtcgacaaagtgctcgtggtgtacgtcgatgatgatgttcagttacgccgccttatggcacgtaacgggtttactgaagaagaagctctgaagcgcattcgttcacagtggcccagtgcggagaaagttaaacgtgcagacgctgtcatcgacaataatggcacgattgaagaaacccgccgccagctgctggccattttacaccagtgggatctgctgggtaagggtggctccggccaccatcatcaccatcac

SEQ ID NO: 816 - protein, 211 aa, synthetic construct
  REGION 1..211: note = Variant of 3'O-kinase
MAFTIGLTGGIAAGKSTVSAMMRELGLPVIDADEAARAVMRPGEEAYRQIVAAFGPGISRADGEIDRQKLGAIRFSDEQQRKVLNAIVGPAVLKKMLAEKEAHIRSGAKTVVLDIPLLFESGLTHWVDKVLVVYVDDDVQLRRLMARNGFTEEEALKRIRSQWPSAEKVKRADAVIDNNGTIEETRRQLLAILHQWDLLGKGGSGHHHHHH

SEQ ID NO: 817 - DNA, 633 bp, synthetic construct
  misc_feature 1..633: note = Variant of 3'O-kinase
  source 1..633: mol_type = other DNA
atggcgtttaccattggtttaacaggagggatcgcagcgggcaaatcgactgtgagtgccatgatgcgtgaactgggtctgccggtcatcgatgctgacgaggcagcacgcgccgttatgcgtccaggcgaagaagcttatcgccagattgtagctgcgttcggtccgggcattcttcgtgccgatggcgagatcgatcgccagaaactgggtgctatccgcttttcggacgaacaacaacgtaaggtgctgaatgcgattgtaggtcctgcagtcctgaagaagatgctcgctgagaaagaagctcatatccgctcaggcgccaagacggttgtgctggatatcccgctgctgttcgaatccggattgacctattgggtcgacaaagtgctcgtggtgtacgtcgatgatgatgttcagttacgccgccttatggcacgtaacgggtttactgaagaagaagctctgaagcgcattcgttcacagtggcccagtgcggagaaagttaaacgtgcagacgctgtcatcgacaataatggcacgattgaagaaacccgccgccagctgctggccattttacaccagtgggatctgctgggtaagggtggctccggccaccatcatcaccatcac

SEQ ID NO: 818 - protein, 211 aa, synthetic construct
  REGION 1..211: note = Variant of 3'O-kinase
MAFTIGLTGGIAAGKSTVSAMMRELGLPVIDADEAARAVMRPGEEAYRQIVAAFGPGILRADGEIDRQKLGAIRFSDEQQRKVLNAIVGPAVLKKMLAEKEAHIRSGAKTVVLDIPLLFESGLTYWVDKVLVVYVDDDVQLRRLMARNGFTEEEALKRIRSQWPSAEKVKRADAVIDNNGTIEETRRQLLAILHQWDLLGKGGSGHHHHHH

SEQ ID NO: 819 - DNA, 633 bp, synthetic construct
  misc_feature 1..633: note = Variant of 3'O-kinase
  source 1..633: mol_type = other DNA
atggcgtttaccattggtttaacaggagggatcgcagcgggcaaatcgtcggtgagtgccatgatgcgtgaactgggtctgccggtcatcgatgctgacgaggcagcacgcgccgttatgcgtccaggcgaagaagcttatcgccagattgtagctgcgttcggtccgggcattcttcgtgccgatggcgagatcgatcgccagaaactgggtgctatccgcttttcggacgaacaacaacgtaaggtgctgaatgcgattgtaggtcctgcagtcctgaagaagatgctcgctgagaaagaagctcatatccgctcaggcgccaagacggttgtgctggatatcccgctgctgttcgaatccggattgacccattgggtcgacaaagtgctcgtggtgtacgtcgatgatgatgttcagttacgccgccttatggcacgtaacgggtttactgaagaagaagctctgaagcgcattcgttcacagtggcccagtgcggagaaagttaaacgtgcagacgctgtcatcgacaataatggcacgattgaagaaacccgccgccagctgctggccattttacaccagtgggatctgctgggtaagggtggctccggccaccatcatcaccatcac

SEQ ID NO: 820 - protein, 211 aa, synthetic construct
  REGION 1..211: note = Variant of 3'O-kinase
MAFTIGLTGGIAAGKSSVSAMMRELGLPVIDADEAARAVMRPGEEAYRQIVAAFGPGILRADGEIDRQKLGAIRFSDEQQRKVLNAIVGPAVLKKMLAEKEAHIRSGAKTVVLDIPLLFESGLTHWVDKVLVVYVDDDVQLRRLMARNGFTEEEALKRIRSQWPSAEKVKRADAVIDNNGTIEETRRQLLAILHQWDLLGKGGSGHHHHHH

SEQ ID NO: 821 - DNA, 633 bp, synthetic construct
  misc_feature 1..633: note = Variant of 3'O-kinase
  source 1..633: mol_type = other DNA
atggcgtttaccattggtttaacaggagggatcgcagcgggcaaatcgactgtgagtgccatgatgcgtgaactgggtctgccggtcatcgatgctgacgaggcagcacgcgccgttatgcgtccaggcgaagaagcttatcgccagattgtagctgcgttcggtccgggcattcttcgtgccgatggcgagatcgatcgccagaaactgggtgctatccgcttttcggacgaacaacaacgtaaggtgctgaatgcgattgtaggtcctgcagtcctgaagaagatgctcgctgagaaagaagctcatatccgctcaggcgccaagacggttgtgctggatatcccgctgctgttcgaatccggattgacccattgggtcgacaaagtgctcgtggtgtacgtcgatgatgatgttcagttacgccgccttatggcacgtaacgggtttactgaagaagaagctctgaagcgcattcgttcacagtggcccagtgcggagaaagttggtcgtgcagacgctgtcatcgacaataatggcacgattgaagaaacccgccgccagctgctggccattttacaccagtgggatctgctgggtaagggtggctccggccaccatcatcaccatcac

SEQ ID NO: 822 - protein, 211 aa, synthetic construct
  REGION 1..211: note = Variant of 3'O-kinase
MAFTIGLTGGIAAGKSTVSAMMRELGLPVIDADEAARAVMRPGEEAYRQIVAAFGPGILRADGEIDRQKLGAIRFSDEQQRKVLNAIVGPAVLKKMLAEKEAHIRSGAKTVVLDIPLLFESGLTHWVDKVLVVYVDDDVQLRRLMARNGFTEEEALKRIRSQWPSAEKVGRADAVIDNNGTIEETRRQLLAILHQWDLLGKGGSGHHHHHH

SEQ ID NO: 823 - DNA, 633 bp, synthetic construct
  misc_feature 1..633: note = Variant of 3'O-kinase
  source 1..633: mol_type = other DNA
atggcgtttaccattggtttaacaggagggatcgcagcgggcaaatcgactgtgagtgccatgatgcgtgaactgggtctgccggtcatcgatgctgacgaggcagcacgcgccgttatgcgtccaggcgaagaagcttatcgccagattgtagctgcgttcggtccgggcattcttcgtgccgatggcgagatcgatcgccagaaactgggtgctatccgcttttcggacgaacaacaacgtaaggtgctgaatgcgattgtaggtcctgcagtcctgaagaagatgctcgctgagaaagaagctcatatccgctcaggcgccaagacggttgtgctggatatcccgctgctgttcgaatccggattgacccattgggtcgacaaagtgctcgtggtgtacgtcgatgatgatgttcagttacgccgccttatggcacgtaacgggtttactgatgaagaagctctgaagcgcattcgttcacagtggcccagtgcggagaaagttaaacgtgcagacgctgtcatcgacaataatggcacgattgaagaaacccgccgccagctgctggccattttacaccagtgggatctgctgggtaagggtggctccggccaccatcatcaccatcac

SEQ ID NO: 824 - protein, 211 aa, synthetic construct
  REGION 1..211: note = Variant of 3'O-kinase
MAFTIGLTGGIAAGKSTVSAMMRELGLPVIDADEAARAVMRPGEEAYRQIVAAFGPGILRADGEIDRQKLGAIRFSDEQQRKVLNAIVGPAVLKKMLAEKEAHIRSGAKTVVLDIPLLFESGLTHWVDKVLVVYVDDDVQLRRLMARNGFTDEEALKRIRSQWPSAEKVKRADAVIDNNGTIEETRRQLLAILHQWDLLGKGGSGHHHHHH

SEQ ID NO: 825 - DNA, 633 bp, synthetic construct
  misc_feature 1..633: note = Variant of 3'O-kinase
  source 1..633: mol_type = other DNA
atggcgtttaccattggtttaacaggagggatcgcagcgggcaaatcgactgtgagtgccatgatgcgtgaactgggtctgccggtcatcgatgctgacgaggcagcacgcgccgttatgcgtccaggcgaagaagctaagcgccagattgtagctgcgttcggtccgggcattcttcgtgccgatggcgagatcgatcgccagaaactgggtgctatccgcttttcggacgaacaacaacgtaaggtgctgaatgcgattgtaggtcctgcagtcctgaagaagatgctcgctgagaaagaagctcatatccgctcaggcgccaagacggttgtgctggatatcccgctgctgttcgaatccggattgacccattgggtcgacaaagtgctcgtggtgtacgtcgatgatgatgttcagttacgccgccttatggcacgtaacgggtttactgaagaagaagctctgaagcgcattcgttcacagtggcccagtgcggagaaagttaaacgtgcagacgctgtcatcgacaataatggcacgattgaagaaacccgccgccagctgctggccattttacaccagtgggatctgctgggtaagggtggctccggccaccatcatcaccatcac

SEQ ID NO: 826 - protein, 211 aa, synthetic construct
  REGION 1..211: note = Variant of 3'O-kinase
MAFTIGLTGGIAAGKSTVSAMMRELGLPVIDADEAARAVMRPGEEAKRQIVAAFGPGILRADGEIDRQKLGAIRFSDEQQRKVLNAIVGPAVLKKMLAEKEAHIRSGAKTVVLDIPLLFESGLTHWVDKVLVVYVDDDVQLRRLMARNGFTEEEALKRIRSQWPSAEKVKRADAVIDNNGTIEETRRQLLAILHQWDLLGKGGSGHHHHHH

SEQ ID NO: 827 - DNA, 633 bp, synthetic construct
  misc_feature 1..633: note = Variant of 3'O-kinase
  source 1..633: mol_type = other DNA
atggcgtttaccattggtttaacaggagggatcgcagcgggcaaatcgactgtgagtgccatgatgcgtgaactgggtctgaatgtcatcgatgctgacgaggcagcacgcgccgttatgcgtccaggcgaagaagcttatcgccagattgtagctgcgttcggtccgggcattcttcgtgccgatggcgagatcgatcgccagaaactgggtgctatccgcttttcggacgaacaacaacgtaaggtgctgaatgcgattgtaggtcctgcagtcctgaagaagatgctcgctgagaaagaagctcatatccgctcaggcgccaagacggttgtgctggatatcccgctgctgttcgaatccggattgacccattgggtcgacaaagtgctcgtggtgtacgtcgatgatgatgttcagttacgccgccttatggcacgtaacgggtttactgaagaagaagctctgaagcgcattcgttcacagtggcccagtgcggagaaagttaaacgtgcagacgctgtcatcgacaataatggcacgattgaagaaacccgccgccagctgctggccattttacaccagtgggatctgctgggtaagggtggctccggccaccatcatcaccatcac

SEQ ID NO: 828 - protein, 211 aa, synthetic construct
  REGION 1..211: note = Variant of 3'O-kinase
MAFTIGLTGGIAAGKSTVSAMMRELGLNVIDADEAARAVMRPGEEAYRQIVAAFGPGILRADGEIDRQKLGAIRFSDEQQRKVLNAIVGPAVLKKMLAEKEAHIRSGAKTVVLDIPLLFESGLTHWVDKVLVVYVDDDVQLRRLMARNGFTEEEALKRIRSQWPSAEKVKRADAVIDNNGTIEETRRQLLAILHQWDLLGKGGSGHHHHHH

SEQ ID NO: 829 - DNA, 633 bp, synthetic construct
  misc_feature 1..633: note = Variant of 3'O-kinase
  source 1..633: mol_type = other DNA
atggcgtttaccattggtttaacaggagggatcgcagcgggcaaatcgactgtgagtgccatgatgcgtgaactgggtctgccggtcatcgatgctgacgaggcagcacgcgccgttatgcgtccaggcgaagaagcttatcgccagattgtagctgcgttcggtccgggcattcttcgtgccgatggcgagatcgatcgccagaaactgggtgctatccgcttttcggacgaacaacaacgtaaggtgctgaatgcgattgtaggtcctgcagtcctgaagaagatgctcgctgagaaagaagctcatatccgctcaggcgccaagacggttgtgctggatatcccgctgctgttcgaatccggattgacccattgggtcgacaaagtgctcgtggtgtacgtcgatgatgatgttcagttacgccgccttatggcacgtaacgggtttactgaagaagaagctctgaagcgcattcgttcacagtggcccagtgcggagaaagttaaacgtgcagacgctgtcatcgacaataatggcacgattgaagaaacccgccgccagctgctggccattttacaccagtgggatctgctgggtaagccgggctccggccaccatcatcaccatcac

SEQ ID NO: 830 - protein, 211 aa, synthetic construct
  REGION 1..211: note = Variant of 3'O-kinase
MAFTIGLTGGIAAGKSTVSAMMRELGLPVIDADEAARAVMRPGEEAYRQIVAAFGPGILRADGEIDRQKLGAIRFSDEQQRKVLNAIVGPAVLKKMLAEKEAHIRSGAKTVVLDIPLLFESGLTHWVDKVLVVYVDDDVQLRRLMARNGFTEEEALKRIRSQWPSAEKVKRADAVIDNNGTIEETRRQLLAILHQWDLLGKPGSGHHHHHH

SEQ ID NO: 831 - DNA, 633 bp, synthetic construct
  misc_feature 1..633: note = Variant of 3'O-kinase
  source 1..633: mol_type = other DNA
atggcgtttaccattggtttaacaggagggatcgcagcgggcaaatcgactgtgagtgccatgatgcgtgaactgggtctgccggtcatcgatgctgacgaggcagcacgcgccgttatgcgtccaggcgaagaagcttatcgcgttattgtagctgcgttcggtccgggcattcttcgtgccgatggcgagatcgatcgccagaaactgggtgctatccgcttttcggacgaacaacaacgtaaggtgctgaatgcgattgtaggtcctgcagtcctgaagaagatgctcgctgagaaagaagctcatatccgctcaggcgccaagacggttgtgctggatatcccgctgctgttcgaatccggattgacccattgggtcgacaaagtgctcgtggtgtacgtcgatgatgatgttcagttacgccgccttatggcacgtaacgggtttactgaagaagaagctctgaagcgcattcgttcacagtggcccagtgcggagaaagttaaacgtgcagacgctgtcatcgacaataatggcacgattgaagaaacccgccgccagctgctggccattttacaccagtgggatctgctgggtaagggtggctccggccaccatcatcaccatcac

SEQ ID NO: 832 - protein, 211 aa, synthetic construct
  REGION 1..211: note = Variant of 3'O-kinase
MAFTIGLTGGIAAGKSTVSAMMRELGLPVIDADEAARAVMRPGEEAYRVIVAAFGPGILRADGEIDRQKLGAIRFSDEQQRKVLNAIVGPAVLKKMLAEKEAHIRSGAKTVVLDIPLLFESGLTHWVDKVLVVYVDDDVQLRRLMARNGFTEEEALKRIRSQWPSAEKVKRADAVIDNNGTIEETRRQLLAILHQWDLLGKGGSGHHHHHH

SEQ ID NO: 833 - DNA, 633 bp, synthetic construct
  misc_feature 1..633: note = Variant of 3'O-kinase
  source 1..633: mol_type = other DNA
atggcgtttaccattggtttaacaggagggatcgcagcgggcaaatcgactgtgagtgccatgatgcgtgaactgggtctgccggtcatcgatgctgacgaggcagcacgcgccgttatgcgtccaggcgaagaagcttatcgccagattgtagctgcgttcggtccgggcattcttcgtgccgatggcgagatcgatcgccagaaactgggtgctatccgcttttcggacgaacaacaacgtaaggtgctgaatgcgattgtaggtcctgcagtcctgaagaagatgctcgctgagaaagaagctcatatccgctcaggcgccaagacggttgtgctggatatcccgctgctgttcgaatccggattgacccattgggtcgactctgtgctcgtggtgtacgtcgatgatgatgttcagttacgccgccttatggcacgtaacgggtttactgaagaagaagctctgaagcgcattcgttcacagtggcccagtgcggagaaagttaaacgtgcagacgctgtcatcgacaataatggcacgattgaagaaacccgccgccagctgctggccattttacaccagtgggatctgctgggtaagggtggctccggccaccatcatcaccatcac

SEQ ID NO: 834 - protein, 211 aa, synthetic construct
  REGION 1..211: note = Variant of 3'O-kinase
MAFTIGLTGGIAAGKSTVSAMMRELGLPVIDADEAARAVMRPGEEAYRQIVAAFGPGILRADGEIDRQKLGAIRFSDEQQRKVLNAIVGPAVLKKMLAEKEAHIRSGAKTVVLDIPLLFESGLTHWVDSVLVVYVDDDVQLRRLMARNGFTEEEALKRIRSQWPSAEKVKRADAVIDNNGTIEETRRQLLAILHQWDLLGKGGSGHHHHHH

SEQ ID NO: 835 - DNA, 633 bp, synthetic construct
  misc_feature 1..633: note = Variant of 3'O-kinase
  source 1..633: mol_type = other DNA
atggcgtttaccattggtttaacaggagggatcgcagcgggcaaatcgactgtgagtgccatgatgcgtgaactgggtctgccggtcatcgatgctgacgaggcagcacgcgccgttatgcgtccaggcgaagaagcttatcgccagattgtagctgcgttcggtccgggcattcttcgtgccgatggcgagatcgatcgccagaaactgggtgctatccgcttttcggacgaacaacaacgtaaggtgctgaatgcgattgtaggtcctgcagtcctgaagaagatgctcgctgagaaagaagctcatatccgctcaggcgccaagacggttgtgctggatatcccgctgctgttcgaatccggattgacccattgggtcgacaaagtgctcgtggtgtacgtcgatgatgatgttcagttacgccgccttatggcacgtaacgggtttactgaagaagaagctctgaagcgcattcgttcacagtggcccagtgcggagaaagttaaacgtgcagacgctgtcatcgacaataatggcacgattgaagaaacccgccgccagctgctggccattttacaccagtgggatctgctgggtaagattggctccggccaccatcatcaccatcac

SEQ ID NO: 836 - protein, 211 aa, synthetic construct
  REGION 1..211: note = Variant of 3'O-kinase
MAFTIGLTGGIAAGKSTVSAMMRELGLPVIDADEAARAVMRPGEEAYRQIVAAFGPGILRADGEIDRQKLGAIRFSDEQQRKVLNAIVGPAVLKKMLAEKEAHIRSGAKTVVLDIPLLFESGLTHWVDKVLVVYVDDDVQLRRLMARNGFTEEEALKRIRSQWPSAEKVKRADAVIDNNGTIEETRRQLLAILHQWDLLGKIGSGHHHHHH

SEQ ID NO: 837 - DNA, 633 bp, synthetic construct
  misc_feature 1..633: note = Variant of 3'O-kinase
  source 1..633: mol_type = other DNA
atggcgtttaccattggtttaacaggagggatcgcagcgggcaaatcgactgtgagtgccatgatgcgtgaactgggtctgccggtcatcgatgctgacgaggcagcacgcgccgttatgcgtccaggcgaagaagcttatcgccagattgtagctgcgttcggtccgggcattcttcgtgccgatggcgagatcgatcgccagaaactgggtgctatccgcttttcggacgaacaacaacgtaaggtgctgaatgcgattgtaggtcctgcagtcctgaagaagatgctcgctgagaaagaagctcatatccgctcaggcgccaagacggttgtgctggatatcccgctgctgttcgaatccggattgacccattgggtcgacaaagtgctcgtggtgtacgtcgatgatgatgttcagttacgccgccttatggcacgtaacgggtttactgaagaagaagctctgaagcgcattcgttcacagtggcccagtgcggagaaagttaaacgtgcagacgctgtcatcgacaataatggcacgattgaagaaacccgccgccagctgctggccattttacaccagtgggtgctgctgggtaagggtggctccggccaccatcatcaccatcac

SEQ ID NO: 838 - protein, 211 aa, synthetic construct
  REGION 1..211: note = Variant of 3'O-kinase
MAFTIGLTGGIAAGKSTVSAMMRELGLPVIDADEAARAVMRPGEEAYRQIVAAFGPGILRADGEIDRQKLGAIRFSDEQQRKVLNAIVGPAVLKKMLAEKEAHIRSGAKTVVLDIPLLFESGLTHWVDKVLVVYVDDDVQLRRLMARNGFTEEEALKRIRSQWPSAEKVKRADAVIDNNGTIEETRRQLLAILHQWVLLGKGGSGHHHHHH

SEQ ID NO: 839 - DNA, 633 bp, synthetic construct
  misc_feature 1..633: note = Variant of 3'O-kinase
  source 1..633: mol_type = other DNA
atggcgtttaccattggtttaacaggagggatcgcagcgggctcttcgactgtgagtgccatgatgcgtgaactgggtctgccggtcatcgatgctgacgaggcagcacgcgccgttatgcgtccaggcgaagaagcttatcgccagattgtagctgcgttcggtccgggcattcttcgtgccgatggcgagatcgatcgccagaaactgggtgctatccgcttttcggacgaacaacaacgtaaggtgctgaatgcgattgtaggtcctgcagtcctgaagaagatgctcgctgagaaagaagctcatatccgctcaggcgccaagacggttgtgctggatatcccgctgctgttcgaatccggattgacccattgggtcgacaaagtgctcgtggtgtacgtcgatgatgatgttcagttacgccgccttatggcacgtaacgggtttactgaagaagaagctctgaagcgcattcgttcacagtggcccagtgcggagaaagttaaacgtgcagacgctgtcatcgacaataatggcacgattgaagaaacccgccgccagctgctggccattttacaccagtgggatctgctgggtaagggtggctccggccaccatcatcaccatcac

SEQ ID NO: 840 - protein, 211 aa, synthetic construct
  REGION 1..211: note = Variant of 3'O-kinase
MAFTIGLTGGIAAGSSTVSAMMRELGLPVIDADEAARAVMRPGEEAYRQIVAAFGPGILRADGEIDRQKLGAIRFSDEQQRKVLNAIVGPAVLKKMLAEKEAHIRSGAKTVVLDIPLLFESGLTHWVDKVLVVYVDDDVQLRRLMARNGFTEEEALKRIRSQWPSAEKVKRADAVIDNNGTIEETRRQLLAILHQWDLLGKGGSGHHHHHH

SEQ ID NO: 841 - DNA, 633 bp, synthetic construct
  misc_feature 1..633: note = Variant of 3'O-kinase
  source 1..633: mol_type = other DNA
atggcgtttaccattggtttaacaggagggatcgcagcgggcaaatcgactgtgagtgccatgatgcgtgaactgggtctgccggtcatcgatgctgacgaggcagcacgcgccgttatgcgtccaggcgaagaagcttatcgccagattgtagctgcgttcggtccgggcattcttcgtgccgatggcgagatcgatcgccagaaactgggtgctatccgcttttcggacgaacaacaacgtaaggtgctgaatgcgattgtaggtcctgcagtcctgaagaagatgctcgctgagagtgaagctcatatccgctcaggcgccaagacggttgtgctggatatcccgctgctgttcgaatccggattgacccattgggtcgacaaagtgctcgtggtgtacgtcgatgatgatgttcagttacgccgccttatggcacgtaacgggtttactgaagaagaagctctgaagcgcattcgttcacagtggcccagtgcggagaaagttaaacgtgcagacgctgtcatcgacaataatggcacgattgaagaaacccgccgccagctgctggccattttacaccagtgggatctgctgggtaagggtggctccggccaccatcatcaccatcac

SEQ ID NO: 842 - protein, 211 aa, synthetic construct
  REGION 1..211: note = Variant of 3'O-kinase
MAFTIGLTGGIAAGKSTVSAMMRELGLPVIDADEAARAVMRPGEEAYRQIVAAFGPGILRADGEIDRQKLGAIRFSDEQQRKVLNAIVGPAVLKKMLAESEAHIRSGAKTVVLDIPLLFESGLTHWVDKVLVVYVDDDVQLRRLMARNGFTEEEALKRIRSQWPSAEKVKRADAVIDNNGTIEETRRQLLAILHQWDLLGKGGSGHHHHHH

SEQ ID NO: 843 - DNA, 633 bp, synthetic construct
  misc_feature 1..633: note = Variant of 3'O-kinase
  source 1..633: mol_type = other DNA
atggcgtttaccattggtttaacaggagggatcgcagcgggcaaatcgactgtgagtgccatgatgcgtgaactgggtctgccggtcatcgatgctgacgaggcagcacgcgccgttatgcgtccaggcgaagaagcttatcgccagattgtagctgcgttcggtccgggcattcttcgtgccgatggcgagatcgatcgccagaaactgggtgctatccgcttttcggacgaacaacaacgtaaggtgctgaatgcgattgtaggtcctgcagtcctgaagaagatgctcgctgagaaagaagctcatatcgagtcaggcgccaagacggttgtgctggatatcccgctgctgttcgaatccggattgacccattgggtcgacaaagtgctcgtggtgtacgtcgatgatgatgttcagttacgccgccttatggcacgtaacgggtttactgaagaagaagctctgaagcgcattcgttcacagtggcccagtgcggagaaagttaaacgtgcagacgctgtcatcgacaataatggcacgattgaagaaacccgccgccagctgctggccattttacaccagtgggatctgctgggtaagggtggctccggccaccatcatcaccatcac

SEQ ID NO: 844 - protein, 211 aa, synthetic construct
  REGION 1..211: note = Variant of 3'O-kinase
MAFTIGLTGGIAAGKSTVSAMMRELGLPVIDADEAARAVMRPGEEAYRQIVAAFGPGILRADGEIDRQKLGAIRFSDEQQRKVLNAIVGPAVLKKMLAEKEAHIESGAKTVVLDIPLLFESGLTHWVDKVLVVYVDDDVQLRRLMARNGFTEEEALKRIRSQWPSAEKVKRADAVIDNNGTIEETRRQLLAILHQWDLLGKGGSGHHHHHH

SEQ ID NO: 845 - DNA, 633 bp, synthetic construct
  misc_feature 1..633: note = Variant of 3'O-kinase
  source 1..633: mol_type = other DNA
atggcgtttaccattggtttaacaggagggatcgcagcgggcaaatcgactgtgagtgccatgatgcgtgaactgggtctgccggtcatcgatgctgacgaggcagcacgcgccgttatgcgtccaggcgaagaagcttatcgccagattgtagctgcgttcggtccgggcattcttcgtgccgatggcgagatcgatcgccagaaactgggtgctatccgcttttcggacgaacaacaacgtaaggtgctgcctgcgattgtaggtcctgcagtcctgaagaagatgctcgctgagaaagaagctcatatccgctcaggcgccaagacggttgtgctggatatcccgctgctgttcgaatccggattgacccattgggtcgacaaagtgctcgtggtgtacgtcgatgatgatgttcagttacgccgccttatggcacgtaacgggtttactgaagaagaagctctgaagcgcattcgttcacagtggcccagtgcggagaaagttaaacgtgcagacgctgtcatcgacaataatggcacgattgaagaaacccgccgccagctgctggccattttacaccagtgggatctgctgggtaagggtggctccggccaccatcatcaccatcac

SEQ ID NO: 846 - protein, 211 aa, synthetic construct
  REGION 1..211: note = Variant of 3'O-kinase
MAFTIGLTGGIAAGKSTVSAMMRELGLPVIDADEAARAVMRPGEEAYRQIVAAFGPGILRADGEIDRQKLGAIRFSDEQQRKVLPAIVGPAVLKKMLAEKEAHIRSGAKTVVLDIPLLFESGLTHWVDKVLVVYVDDDVQLRRLMARNGFTEEEALKRIRSQWPSAEKVKRADAVIDNNGTIEETRRQLLAILHQWDLLGKGGSGHHHHHH

SEQ ID NO: 847 - DNA, 633 bp, synthetic construct
  misc_feature 1..633: note = Variant of 3'O-kinase
  source 1..633: mol_type = other DNA
atggcgtttaccattggtttaacaggagggatcgcagcgggcaaatcgactgtgagtgccatgatgcgtgaactgggtctgccggtcatcgatgctgacgaggcagcacgcgccgttatgcgtccaggcgaagaagcttatcgccagattgtagctgcgttcggtccgggcattcttcgtgccgatggcgagatcgatcgccagaaactgggtgctatccgcttttcggacgaacaacaacgtaaggtgctgaatgcgattgtaggtcctgcagtcctgaagaagatgctcgctgagaaagaagctcatatccgctcaggcgccaagacggttgtgctggatatcccgctgctgttcgaatccggattgacccattgggtcgacaaagtgctcgtggtgtacgtcgatgatgatgttcagttatatcgccttatggcacgtaacgggtttactgaagaagaagctctgaagcgcattcgttcacagtggcccagtgcggagaaagttaaacgtgcagacgctgtcatcgacaataatggcacgattgaagaaacccgccgccagctgctggccattttacaccagtgggatctgctgggtaagggtggctccggccaccatcatcaccatcac

SEQ ID NO: 848 - protein, 211 aa, synthetic construct
  REGION 1..211: note = Variant of 3'O-kinase
MAFTIGLTGGIAAGKSTVSAMMRELGLPVIDADEAARAVMRPGEEAYRQIVAAFGPGILRADGEIDRQKLGAIRFSDEQQRKVLNAIVGPAVLKKMLAEKEAHIRSGAKTVVLDIPLLFESGLTHWVDKVLVVYVDDDVQLYRLMARNGFTEEEALKRIRSQWPSAEKVKRADAVIDNNGTIEETRRQLLAILHQWDLLGKGGSGHHHHHH

SEQ ID NO: 849 - DNA, 633 bp, synthetic construct
  misc_feature 1..633: note = Variant of 3'O-kinase
  source 1..633: mol_type = other DNA
atggcgtttaccattggtttaacaggagggatcgcagcgggcaaatcgactgtgagtgccatgatgcgtgaactgggtctgccggtcatcgatgctgacgaggcagcacgcgccgttatgcgtccaggcgaagaagcttatcgccagattgtagctgcgttcggtccgggcattcttcgtgccgatggcgagatcgatcgccagaaactgggtgctatccgcttttcggacgaacaacaacgtaaggtgctgaatgcgattgtaggtcctgcagtcctgtgtaagatgctcgctgagaaagaagctcatatccgctcaggcgccaagacggttgtgctggatatcccgctgctgttcgaatccggattgacccattgggtcgacaaagtgctcgtggtgtacgtcgatgatgatgttcagttacgccgccttatggcacgtaacgggtttactgaagaagaagctctgaagcgcattcgttcacagtggcccagtgcggagaaagttaaacgtgcagacgctgtcatcgacaataatggcacgattgaagaaacccgccgccagctgctggccattttacaccagtgggatctgctgggtaagggtggctccggccaccatcatcaccatcac

SEQ ID NO: 850 - protein, 211 aa, synthetic construct
  REGION 1..211: note = Variant of 3'O-kinase
MAFTIGLTGGIAAGKSTVSAMMRELGLPVIDADEAARAVMRPGEEAYRQIVAAFGPGILRADGEIDRQKLGAIRFSDEQQRKVLNAIVGPAVLCKMLAEKEAHIRSGAKTVVLDIPLLFESGLTHWVDKVLVVYVDDDVQLRRLMARNGFTEEEALKRIRSQWPSAEKVKRADAVIDNNGTIEETRRQLLAILHQWDLLGKGGSGHHHHHH

SEQ ID NO: 851 - DNA, 633 bp, synthetic construct
  misc_feature 1..633: note = Variant of 3'O-kinase
  source 1..633: mol_type = other DNA
atggcgtttaccattggtttaacaggagggatcgcagcgggcaaatcgactgtgagtgccatgatgcgtgaactgggtctgccggtcatcgatgctgacgaggcagcacgcgccgttatgcgtccaggcgatgaagcttatcgccagattgtagctgcgttcggtccgggcattcttcgtgccgatggcgagatcgatcgccagaaactgggtgctatccgcttttcggacgaacaacaacgtaaggtgctgaatgcgattgtaggtcctgcagtcctgaagaagatgctcgctgagaaagaagctcatatccgctcaggcgccaagacggttgtgctggatatcccgctgctgttcgaatccggattgacccattgggtcgacaaagtgctcgtggtgtacgtcgatgatgatgttcagttacgccgccttatggcacgtaacgggtttactgaagaagaagctctgaagcgcattcgttcacagtggcccagtgcggagaaagttaaacgtgcagacgctgtcatcgacaataatggcacgattgaagaaacccgccgccagctgctggccattttacaccagtgggatctgctgggtaagggtggctccggccaccatcatcaccatcac

SEQ ID NO: 852 - protein, 211 aa, synthetic construct
  REGION 1..211: note = Variant of 3'O-kinase
MAFTIGLTGGIAAGKSTVSAMMRELGLPVIDADEAARAVMRPGDEAYRQIVAAFGPGILRADGEIDRQKLGAIRFSDEQQRKVLNAIVGPAVLKKMLAEKEAHIRSGAKTVVLDIPLLFESGLTHWVDKVLVVYVDDDVQLRRLMARNGFTEEEALKRIRSQWPSAEKVKRADAVIDNNGTIEETRRQLLAILHQWDLLGKGGSGHHHHHH

SEQ ID NO: 853 - DNA, 633 bp, synthetic construct
  misc_feature 1..633: note = Variant of 3'O-kinase
  source 1..633: mol_type = other DNA
atggcgtttggtattggtttaacaggagggatcgcagcgggcaaatcgactgtgagtgccatgatgcgtgaactgggtctgccggtcatcgatgctgacgaggcagcacgcgccgttatgcgtccaggcgaagaagcttatcgccagattgtagctgcgttcggtccgggcattcttcgtgccgatggcgagatcgatcgccagaaactgggtgctatccgcttttcggacgaacaacaacgtaaggtgctgaatgcgattgtaggtcctgcagtcctgaagaagatgctcgctgagaaagaagctcatatccgctcaggcgccaagacggttgtgctggatatcccgctgctgttcgaatccggattgacccattgggtcgacaaagtgctcgtggtgtacgtcgatgatgatgttcagttacgccgccttatggcacgtaacgggtttactgaagaagaagctctgaagcgcattcgttcacagtggcccagtgcggagaaagttaaacgtgcagacgctgtcatcgacaataatggcacgattgaagaaacccgccgccagctgctggccattttacaccagtgggatctgctgggtaagggtggctccggccaccatcatcaccatcac

SEQ ID NO: 854 - protein, 211 aa, synthetic construct
  REGION 1..211: note = Variant of 3'O-kinase
MAFGIGLTGGIAAGKSTVSAMMRELGLPVIDADEAARAVMRPGEEAYRQIVAAFGPGILRADGEIDRQKLGAIRFSDEQQRKVLNAIVGPAVLKKMLAEKEAHIRSGAKTVVLDIPLLFESGLTHWVDKVLVVYVDDDVQLRRLMARNGFTEEEALKRIRSQWPSAEKVKRADAVIDNNGTIEETRRQLLAILHQWDLLGKGGSGHHHHHH

SEQ ID NO: 855 - DNA, 633 bp, synthetic construct
  misc_feature 1..633: note = Variant of 3'O-kinase
  source 1..633: mol_type = other DNA
atggcgtttaccattggtttaacaggagggatcgcagcgggcaaatcgactgtgagtgccatgatgcgtgaactgggtctgccggtcatcgatgctgacgaggcagcacgcgccgttatgcgtccaggcgaagaagcttatcgccagattgtagctgcgttcggtccgggcattcttcgtgccgatggcgagatcgatcgccagaaactgggtgctatccgcttttcggacgaacaacaacgtaaggtgctgaatgcgattgtaggtcctgcagtcctgaagaagatgctcgctgagaaagaagctcatatccgctcaggcgccaagacggttgtgctggatatcccgctgctgttcgaatccggattgacccattgggtcgacaaagtgctcgtggtgtacgtcgatgatgatgttcagttacgccgccttatggcacgtaacgggtttactgaagaagaagctctgaagcgcattcgttcacagtggcccagtgcggagaaagttaaaggggcagacgctgtcatcgacaataatggcacgattgaagaaacccgccgccagctgctggccattttacaccagtgggatctgctgggtaagggtggctccggccaccatcatcaccatcac

SEQ ID NO: 856 - protein, 211 aa, synthetic construct
  REGION 1..211: note = Variant of 3'O-kinase
MAFTIGLTGGIAAGKSTVSAMMRELGLPVIDADEAARAVMRPGEEAYRQIVAAFGPGILRADGEIDRQKLGAIRFSDEQQRKVLNAIVGPAVLKKMLAEKEAHIRSGAKTVVLDIPLLFESGLTHWVDKVLVVYVDDDVQLRRLMARNGFTEEEALKRIRSQWPSAEKVKGADAVIDNNGTIEETRRQLLAILHQWDLLGKGGSGHHHHHH

SEQ ID NO: 857 - DNA, 633 bp, synthetic construct
  misc_feature 1..633: note = Variant of 3'O-kinase
  source 1..633: mol_type = other DNA
atggcgtttaccattggtttaacaggagggatcgcagcgggcaaatcgactgtgagtgccatgatgcgtgaactgggtctgccggtcatcgatgctgacgaggcagcacgcgccgttatgcgtccaggcgaagaagcttatcgccagattgtagctgcgttcggtccgggcattcttcgtgccgatagtgagatcgatcgccagaaactgggtgctatccgcttttcggacgaacaacaacgtaaggtgctgaatgcgattgtaggtcctgcagtcctgaagaagatgctcgctgagaaagaagctcatatccgctcaggcgccaagacggttgtgctggatatcccgctgctgttcgaatccggattgacccattgggtcgacaaagtgctcgtggtgtacgtcgatgatgatgttcagttacgccgccttatggcacgtaacgggtttactgaagaagaagctctgaagcgcattcgttcacagtggcccagtgcggagaaagttaaacgtgcagacgctgtcatcgacaataatggcacgattgaagaaacccgccgccagctgctggccattttacaccagtgggatctgctgggtaagggtggctccggccaccatcatcaccatcac

SEQ ID NO: 858 - protein, 211 aa, synthetic construct
  REGION 1..211: note = Variant of 3'O-kinase
MAFTIGLTGGIAAGKSTVSAMMRELGLPVIDADEAARAVMRPGEEAYRQIVAAFGPGILRADSEIDRQKLGAIRFSDEQQRKVLNAIVGPAVLKKMLAEKEAHIRSGAKTVVLDIPLLFESGLTHWVDKVLVVYVDDDVQLRRLMARNGFTEEEALKRIRSQWPSAEKVKRADAVIDNNGTIEETRRQLLAILHQWDLLGKGGSGHHHHHH

SEQ ID NO: 859 - DNA, 633 bp, synthetic construct
  misc_feature 1..633: note = Variant of 3'O-kinase
  source 1..633: mol_type = other DNA
atggcgtttaccattggtttaacaggagggatcgcagcgggcaaatcgactgtgagtgccatgatgcgtgaactgggtctgccggtcatcgatgctgacgaggcagcacgcgccgttatgcgtccaggcgaagaagcttatcgccagattgtagctgcgttcggtccgggcattcttcgtgccgatggcgagatcgatcgccagaaactgggtgctatccgcttttcggacgaacaacaacgtaaggtgctgaatgcgattgtaggtcctgcagtcctgaagaagatgctcgctgagaaagaagctcatatcagttcaggcgccaagacggttgtgctggatatcccgctgctgttcgaatccggattgacccattgggtcgacaaagtgctcgtggtgtacgtcgatgatgatgttcagttacgccgccttatggcacgtaacgggtttactgaagaagaagctctgaagcgcattcgttcacagtggcccagtgcggagaaagttaaacgtgcagacgctgtcatcgacaataatggcacgattgaagaaacccgccgccagctgctggccattttacaccagtgggatctgctgggtaagggtggctccggccaccatcatcaccatcac

SEQ ID NO: 860 - protein, 211 aa, synthetic construct
  REGION 1..211: note = Variant of 3'O-kinase
MAFTIGLTGGIAAGKSTVSAMMRELGLPVIDADEAARAVMRPGEEAYRQIVAAFGPGILRADGEIDRQKLGAIRFSDEQQRKVLNAIVGPAVLKKMLAEKEAHISSGAKTVVLDIPLLFESGLTHWVDKVLVVYVDDDVQLRRLMARNGFTEEEALKRIRSQWPSAEKVKRADAVIDNNGTIEETRRQLLAILHQWDLLGKGGSGHHHHHH

SEQ ID NO: 861 - DNA, 633 bp, synthetic construct
  misc_feature 1..633: note = Variant of 3'O-kinase
  source 1..633: mol_type = other DNA
atggcgtttaccattggtttaacaggagggatcgcagcgggcaaatcgactgtgagtgccatgatgcgtgaactgggtctgccggtcatcgatgctgacgaggcagcacgcgccgttatgcgtccaggcgaagaagcttatcgccagattgtagctgcgttcggtccgtgtattcttcgtgccgatggcgagatcgatcgccagaaactgggtgctatccgcttttcggacgaacaacaacgtaaggtgctgaatgcgattgtaggtcctgcagtcctgaagaagatgctcgctgagaaagaagctcatatccgctcaggcgccaagacggttgtgctggatatcccgctgctgttcgaatccggattgacccattgggtcgacaaagtgctcgtggtgtacgtcgatgatgatgttcagttacgccgccttatggcacgtaacgggtttactgaagaagaagctctgaagcgcattcgttcacagtggcccagtgcggagaaagttaaacgtgcagacgctgtcatcgacaataatggcacgattgaagaaacccgccgccagctgctggccattttacaccagtgggatctgctgggtaagggtggctccggccaccatcatcaccatcac

SEQ ID NO: 862 - protein, 211 aa, synthetic construct
  REGION 1..211: note = Variant of 3'O-kinase
MAFTIGLTGGIAAGKSTVSAMMRELGLPVIDADEAARAVMRPGEEAYRQIVAAFGPCILRADGEIDRQKLGAIRFSDEQQRKVLNAIVGPAVLKKMLAEKEAHIRSGAKTVVLDIPLLFESGLTHWVDKVLVVYVDDDVQLRRLMARNGFTEEEALKRIRSQWPSAEKVKRADAVIDNNGTIEETRRQLLAILHQWDLLGKGGSGHHHHHH

SEQ ID NO: 863 - DNA, 633 bp, synthetic construct
  misc_feature 1..633: note = Variant of 3'O-kinase
  source 1..633: mol_type = other DNA
atggcgtttaccattggtttaacaggagggatcgcagcgggcaaatcgactgtgagtgccatgatgcgtgaactgggtctgccggtcatcgatgctgacgaggcagcacgcgccgttatgcgtccaggcgaagaagcttatcgccagattgtagctgcgttcggtccgggcattcttcgtgccgatggcgagatcgatcgccagaaactgggtgctatccgcttttcggacgaacaacaacgtaaggtgctgaatgcgattgtaggtcctgcagtcctgaagaagatgctcgctgagaaagaagctcatatcgggtcaggcgccaagacggttgtgctggatatcccgctgctgttcgaatccggattgacccattgggtcgacaaagtgctcgtggtgtacgtcgatgatgatgttcagttacgccgccttatggcacgtaacgggtttactgaagaagaagctctgaagcgcattcgttcacagtggcccagtgcggagaaagttaaacgtgcagacgctgtcatcgacaataatggcacgattgaagaaacccgccgccagctgctggccattttacaccagtgggatctgctgggtaagggtggctccggccaccatcatcaccatcac

SEQ ID NO: 864 - protein, 211 aa, synthetic construct
  REGION 1..211: note = Variant of 3'O-kinase
MAFTIGLTGGIAAGKSTVSAMMRELGLPVIDADEAARAVMRPGEEAYRQIVAAFGPGILRADGEIDRQKLGAIRFSDEQQRKVLNAIVGPAVLKKMLAEKEAHIGSGAKTVVLDIPLLFESGLTHWVDKVLVVYVDDDVQLRRLMARNGFTEEEALKRIRSQWPSAEKVKRADAVIDNNGTIEETRRQLLAILHQWDLLGKGGSGHHHHHH

SEQ ID NO: 865 - DNA, 633 bp, synthetic construct
  misc_feature 1..633: note = Variant of 3'O-kinase
  source 1..633: mol_type = other DNA
atggcgtttaccattggtttaacaggagggatcgcagcgggcaaatcgactgtgagtgccatgatgcgtgaactgggtctgccggtcatcgatgctgacgaggcagcacgcgccgttatgcgtccaggcgaagaagcttatcgccagattgtagctgcgttcggtccgggcattcttcgtgccgatggcgagatcgatcgccagaaactgggtgctatccgcttttcggacgaacaacaacgtaaggtgctgaatgcgattgtaggtcctgcagtcctgaagaagatgctcgctgagaaagaagctcatatccgctcaggcgccaagacggttgtgctggatatcccgctgctgttcgaatccggattgacccattgggtcgacaaagtgctcgtggtgtacgtcgatgatgatgttcagttacgccgccttatggcacgtaacccgtttactgaagaagaagctctgaagcgcattcgttcacagtggcccagtgcggagaaagttaaacgtgcagacgctgtcatcgacaataatggcacgattgaagaaacccgccgccagctgctggccattttacaccagtgggatctgctgggtaagggtggctccggccaccatcatcaccatcac

SEQ ID NO: 866 - protein, 211 aa, synthetic construct
  REGION 1..211: note = Variant of 3'O-kinase
MAFTIGLTGGIAAGKSTVSAMMRELGLPVIDADEAARAVMRPGEEAYRQIVAAFGPGILRADGEIDRQKLGAIRFSDEQQRKVLNAIVGPAVLKKMLAEKEAHIRSGAKTVVLDIPLLFESGLTHWVDKVLVVYVDDDVQLRRLMARNPFTEEEALKRIRSQWPSAEKVKRADAVIDNNGTIEETRRQLLAILHQWDLLGKGGSGHHHHHH

SEQ ID NO: 867 - DNA, 633 bp, synthetic construct
  misc_feature 1..633: note = Variant of 3'O-kinase
  source 1..633: mol_type = other DNA
atggcgtttaccattggtttaacaggagggatcgcagcgggcaaatcgactgtgagtgccatgatgcgtgaactgggtctgccggtcatcgatgctgacgaggcagcacgcgccgttatgcgtccaggcgaagaagcttatcgccaggaggtagctgcgttcggtccgggcattcttcgtgccgatggcgagatcgatcgccagaaactgggtgctatccgcttttcggacgaacaacaacgtaaggtgctgaatgcgattgtaggtcctgcagtcctgaagaagatgctcgctgagaaagaagctcatatccgctcaggcgccaagacggttgtgctggatatcccgctgctgttcgaatccggattgacccattgggtcgacaaagtgctcgtggtgtacgtcgatgatgatgttcagttacgccgccttatggcacgtaacgggtttactgaagaagaagctctgaagcgcattcgttcacagtggcccagtgcggagaaagttaaacgtgcagacgctgtcatcgacaataatggcacgattgaagaaacccgccgccagctgctggccattttacaccagtgggatctgctgggtaagggtggctccggccaccatcatcaccatcac

SEQ ID NO: 868 - protein, 211 aa, synthetic construct
  REGION 1..211: note = Variant of 3'O-kinase
MAFTIGLTGGIAAGKSTVSAMMRELGLPVIDADEAARAVMRPGEEAYRQEVAAFGPGILRADGEIDRQKLGAIRFSDEQQRKVLNAIVGPAVLKKMLAEKEAHIRSGAKTVVLDIPLLFESGLTHWVDKVLVVYVDDDVQLRRLMARNGFTEEEALKRIRSQWPSAEKVKRADAVIDNNGTIEETRRQLLAILHQWDLLGKGGSGHHHHHH

SEQ ID NO: 869 - DNA, 633 bp, synthetic construct
  misc_feature 1..633: note = Variant of 3'O-kinase
  source 1..633: mol_type = other DNA
atggcgtttgtgattggtttaacaggagggatcgcagcgggcaaatcgactgtgagtgccatgatgcgtgaactgggtctgccggtcatcgatgctgacgaggcagcacgcgccgttatgcgtccaggcgaagaagcttatcgccagattgtagctgcgttcggtccgggcattcttcgtgccgatggcgagatcgatcgccagaaactgggtgctatccgcttttcggacgaacaacaacgtaaggtgctgaatgcgattgtaggtcctgcagtcctgaagaagatgctcgctgagaaagaagctcatatccgctcaggcgccaagacggttgtgctggatatcccgctgctgttcgaatccggattgacccattgggtcgacaaagtgctcgtggtgtacgtcgatgatgatgttcagttacgccgccttatggcacgtaacgggtttactgaagaagaagctctgaagcgcattcgttcacagtggcccagtgcggagaaagttaaacgtgcagacgctgtcatcgacaataatggcacgattgaagaaacccgccgccagctgctggccattttacaccagtgggatctgctgggtaagggtggctccggccaccatcatcaccatcac

SEQ ID NO: 870 - protein, 211 aa, synthetic construct
  REGION 1..211: note = Variant of 3'O-kinase
MAFVIGLTGGIAAGKSTVSAMMRELGLPVIDADEAARAVMRPGEEAYRQIVAAFGPGILRADGEIDRQKLGAIRFSDEQQRKVLNAIVGPAVLKKMLAEKEAHIRSGAKTVVLDIPLLFESGLTHWVDKVLVVYVDDDVQLRRLMARNGFTEEEALKRIRSQWPSAEKVKRADAVIDNNGTIEETRRQLLAILHQWDLLGKGGSGHHHHHH

SEQ ID NO: 871 - DNA, 633 bp, synthetic construct
  misc_feature 1..633: note = Variant of 3'O-kinase
  source 1..633: mol_type = other DNA
atggcgtttaccattggtttaacaggagggatcgcagcgggcaaatcgactgtgagtgccatgatgcgtgaactgggtctgccggtcatcgatgctgacgaggcagcacgcgccgttatgcgtccaggcgaagaagcttatcgccagattgtagctgcgttcggtccgggcattcttcgtgccgatggcgagatcgatcgccagaaactgggtgctatccgcttttcggacgaacaacaacgtaaggtgctgaatgcgattgtaggtcctgcagtcctgaagaagatgctcgctgagaaagaagctcatatccgctcaggcgccaagacggttgtgctggatatcccgctgctgttcgaatccggattgacccattgggtcgacaaagtgctcgtggtgtacgtcgatgatgatgttcagttacgccgccttatggcacgtaacgggtttactgaagaagaagctctgaagcgcattcgttcacagtggcccagtgcggagaaagttaaactggcagacgctgtcatcgacaataatggcacgattgaagaaacccgccgccagctgctggccattttacaccagtgggatctgctgggtaagggtggctccggccaccatcatcaccatcac

SEQ ID NO: 872 - protein, 211 aa, synthetic construct
  REGION 1..211: note = Variant of 3'O-kinase
MAFTIGLTGGIAAGKSTVSAMMRELGLPVIDADEAARAVMRPGEEAYRQIVAAFGPGILRADGEIDRQKLGAIRFSDEQQRKVLNAIVGPAVLKKMLAEKEAHIRSGAKTVVLDIPLLFESGLTHWVDKVLVVYVDDDVQLRRLMARNGFTEEEALKRIRSQWPSAEKVKLADAVIDNNGTIEETRRQLLAILHQWDLLGKGGSGHHHHHH

SEQ ID NO: 873 - DNA, 633 bp, synthetic construct
  misc_feature 1..633: note = Variant of 3'O-kinase
  source 1..633: mol_type = other DNA
atggcgtttaccattggtttaacaggagggatcgcagcgggcaaatcgactgtgagtgccatgatgcgtgaactgggtctgccggtcatcgatgctgacgaggcagcacgcgccgttatgcgtccaggcgaagaagcttatcgccagattgtagctgcgttctatccgggcattcttcgtgccgatggcgagatcgatcgccagaaactgggtgctatccgcttttcggacgaacaacaacgtaaggtgctgaatgcgattgtaggtcctgcagtcctgaagaagatgctcgctgagaaagaagctcatatccgctcaggcgccaagacggttgtgctggatatcccgctgctgttcgaatccggattgacccattgggtcgacaaagtgctcgtggtgtacgtcgatgatgatgttcagttacgccgccttatggcacgtaacgggtttactgaagaagaagctctgaagcgcattcgttcacagtggcccagtgcggagaaagttaaacgtgcagacgctgtcatcgacaataatggcacgattgaagaaacccgccgccagctgctggccattttacaccagtgggatctgctgggtaagggtggctccggccaccatcatcaccatcac

SEQ ID NO: 874 - protein, 211 aa, synthetic construct
  REGION 1..211: note = Variant of 3'O-kinase
MAFTIGLTGGIAAGKSTVSAMMRELGLPVIDADEAARAVMRPGEEAYRQIVAAFYPGILRADGEIDRQKLGAIRFSDEQQRKVLNAIVGPAVLKKMLAEKEAHIRSGAKTVVLDIPLLFESGLTHWVDKVLVVYVDDDVQLRRLMARNGFTEEEALKRIRSQWPSAEKVKRADAVIDNNGTIEETRRQLLAILHQWDLLGKGGSGHHHHHH

SEQ ID NO: 875 - DNA, 633 bp, synthetic construct
  misc_feature 1..633: note = Variant of 3'O-kinase
  source 1..633: mol_type = other DNA
atggcgtttaccattggtttaacaggagggatcgcagcgggcaaatcgactgtgagtgccatgagtcgtgaactgggtctgccggtcatcgatgctgacgaggcagcacgcgccgttatgcgtccaggcgaagaagcttatcgccagattgtagctgcgttcggtccgggcattcttcgtgccgatggcgagatcgatcgccagaaactgggtgctatccgcttttcggacgaacaacaacgtaaggtgctgaatgcgattgtaggtcctgcagtcctgaagaagatgctcgctgagaaagaagctcatatccgctcaggcgccaagacggttgtgctggatatcccgctgctgttcgaatccggattgacccattgggtcgacaaagtgctcgtggtgtacgtcgatgatgatgttcagttacgccgccttatggcacgtaacgggtttactgaagaagaagctctgaagcgcattcgttcacagtggcccagtgcggagaaagttaaacgtgcagacgctgtcatcgacaataatggcacgattgaagaaacccgccgccagctgctggccattttacaccagtgggatctgctgggtaagggtggctccggccaccatcatcaccatcac

SEQ ID NO: 876 - protein, 211 aa, synthetic construct
  REGION 1..211: note = Variant of 3'O-kinase
MAFTIGLTGGIAAGKSTVSAMSRELGLPVIDADEAARAVMRPGEEAYRQIVAAFGPGILRADGEIDRQKLGAIRFSDEQQRKVLNAIVGPAVLKKMLAEKEAHIRSGAKTVVLDIPLLFESGLTHWVDKVLVVYVDDDVQLRRLMARNGFTEEEALKRIRSQWPSAEKVKRADAVIDNNGTIEETRRQLLAILHQWDLLGKGGSGHHHHHH

SEQ ID NO: 877 - DNA, 633 bp, synthetic construct
  misc_feature 1..633: note = Variant of 3'O-kinase
  source 1..633: mol_type = other DNA
atggcgtttaccattggtttaacaggagggatcgcagcgggcaaatcgactgtgagtgccatgatgcgtgaactgggtctgccggtcatcgatgctgacgaggcagcacgcgccgttatgcgtccaggcgaagaagcttatcgccagattgtagctgcgttcggtccgggcattcttgtggccgatggcgagatcgatcgccagaaactgggtgctatccgcttttcggacgaacaacaacgtaaggtgctgaatgcgattgtaggtcctgcagtcctgaagaagatgctcgctgagaaagaagctcatatccgctcaggcgccaagacggttgtgctggatatcccgctgctgttcgaatccggattgacccattgggtcgacaaagtgctcgtggtgtacgtcgatgatgatgttcagttacgccgccttatggcacgtaacgggtttactgaagaagaagctctgaagcgcattcgttcacagtggcccagtgcggagaaagttaaacgtgcagacgctgtcatcgacaataatggcacgattgaagaaacccgccgccagctgctggccattttacaccagtgggatctgctgggtaagggtggctccggccaccatcatcaccatcac

SEQ ID NO: 878 - protein, 211 aa, synthetic construct
  REGION 1..211: note = Variant of 3'O-kinase
MAFTIGLTGGIAAGKSTVSAMMRELGLPVIDADEAARAVMRPGEEAYRQIVAAFGPGILVADGEIDRQKLGAIRFSDEQQRKVLNAIVGPAVLKKMLAEKEAHIRSGAKTVVLDIPLLFESGLTHWVDKVLVVYVDDDVQLRRLMARNGFTEEEALKRIRSQWPSAEKVKRADAVIDNNGTIEETRRQLLAILHQWDLLGKGGSGHHHHHH

SEQ ID NO: 879 - DNA, 633 bp, synthetic construct
  misc_feature 1..633: note = Variant of 3'O-kinase
  source 1..633: mol_type = other DNA
atggcgtttaccattggtttaacaggagggatcgcagcgggcaaatcgactgtgagtgccatgatgcgtgaactgggtctgccggtcatcgatgctgacgaggcagcacgcgccgttatgcgtccaggcgaagaagcttatcgccagattgtagctgcgttcggtccgggcattcttcgtgccgatggcgagatcgatcgccagaaactgggtgctatccgcttttcggacgaacaacaacgtaaggtgctgaatgcgattgtaggtcctgcagtcctgaagaagatgctcgctgagaaagaagctcatatccgctcaggcgccaagacggttgtgctggatatcccgctgctgttcgaatccggattgacccattgggtcgacaaagtgctcgtggtgtacgtcgatgatgatgttcagttacgccgccttatggcacgtaacgggtttactgaagaagaagctctgaagcgcattcgttcacagtggcccagtgcggagaaagttaaacgtgcaccggctgtcatcgacaataatggcacgattgaagaaacccgccgccagctgctggccattttacaccagtgggatctgctgggtaagggtggctccggccaccatcatcaccatcac

SEQ ID NO: 880 - protein, 211 aa, synthetic construct
  REGION 1..211: note = Variant of 3'O-kinase
MAFTIGLTGGIAAGKSTVSAMMRELGLPVIDADEAARAVMRPGEEAYRQIVAAFGPGILRADGEIDRQKLGAIRFSDEQQRKVLNAIVGPAVLKKMLAEKEAHIRSGAKTVVLDIPLLFESGLTHWVDKVLVVYVDDDVQLRRLMARNGFTEEEALKRIRSQWPSAEKVKRAPAVIDNNGTIEETRRQLLAILHQWDLLGKGGSGHHHHHH

SEQ ID NO: 881 - DNA, 633 bp, synthetic construct
  misc_feature 1..633: note = Variant of 3'O-kinase
  source 1..633: mol_type = other DNA
atggcgtttaccattggtttaacaggagggatcgcagcgggcaaatcgactgtgagtgccatgatgcgtgaactgggtctgccggtcatcgatgctgacgaggcagcacgcgccgttatgcgtccaggcgaagaagcttatcgccagattgtagctgcgttcggtccgggcattcttcgtgccgatggcgagatcgatcgccagaaactgggtgctatccgcttttcggacgaacaacaacgtaaggtgctgaatgcgattgtaggtcctgcagtcctgaagaagatgctcgctgagaaagaagctcatatccgctcaggcgccaagacggttgtgctggatatcccgctgctgttcgaatccggattgacccattgggtcgacaaagtgctcgtggtgtacgtcgatgatgatgttcagttacgccgccttatggcacgtaacgggtttactgaagaagaagctctgaagcgcattcgttcacagtggcccagtgcggagaaagttaaacgtgcagacgctgtcatcgacaataatggcacgattgaagaaacccgccgccagctgctggccattttacaccagtgggatctgctgggtaagacgggctccggccaccatcatcaccatcac

SEQ ID NO: 882 - protein, 211 aa, synthetic construct
  REGION 1..211: note = Variant of 3'O-kinase
MAFTIGLTGGIAAGKSTVSAMMRELGLPVIDADEAARAVMRPGEEAYRQIVAAFGPGILRADGEIDRQKLGAIRFSDEQQRKVLNAIVGPAVLKKMLAEKEAHIRSGAKTVVLDIPLLFESGLTHWVDKVLVVYVDDDVQLRRLMARNGFTEEEALKRIRSQWPSAEKVKRADAVIDNNGTIEETRRQLLAILHQWDLLGKTGSGHHHHHH

SEQ ID NO: 883 - DNA, 633 bp, synthetic construct
  misc_feature 1..633: note = Variant of 3'O-kinase
  source 1..633: mol_type = other DNA
atggcgtttaccattggtttaacaggagggatcgcagcgggcaaatcgactgtgagtgccatgatgcgtgaactgggtctgccggtcatcgatgctgacgaggcagcacgcgccgttatgcgtccaggcgaagaagcttatcgccagattgtagctgcgttcggtccgggcattcttcgtgccgatggcgagatcgatcgccagaaactgggtgctatccgcttttcggacgaacaacaacgtaaggtgctgaatgcgattgtaggtcctgcagtcctgaagaagatgctcgctgagaaagaagctcatatccgctcaggcgccaagacggttgtgctggatatcccgctgctgttcgaatccggattgacccattggtgtgacaaagtgctcgtggtgtacgtcgatgatgatgttcagttacgccgccttatggcacgtaacgggtttactgaagaagaagctctgaagcgcattcgttcacagtggcccagtgcggagaaagttaaacgtgcagacgctgtcatcgacaataatggcacgattgaagaaacccgccgccagctgctggccattttacaccagtgggatctgctgggtaagggtggctccggccaccatcatcaccatcac

SEQ ID NO: 884 - protein, 211 aa, synthetic construct
  REGION 1..211: note = Variant of 3'O-kinase
MAFTIGLTGGIAAGKSTVSAMMRELGLPVIDADEAARAVMRPGEEAYRQIVAAFGPGILRADGEIDRQKLGAIRFSDEQQRKVLNAIVGPAVLKKMLAEKEAHIRSGAKTVVLDIPLLFESGLTHWCDKVLVVYVDDDVQLRRLMARNGFTEEEALKRIRSQWPSAEKVKRADAVIDNNGTIEETRRQLLAILHQWDLLGKGGSGHHHHHH

SEQ ID NO: 885 - DNA, 633 bp, synthetic construct
  misc_feature 1..633: note = Variant of 3'O-kinase
  source 1..633: mol_type = other DNA
atggcgtttaccattggtttaacaggagggatcgcagcgggcaaatcgactgtgagtgccatgatgcgtgaactgggtctgccggtcatcgatgctgacgaggcagcacgcgccgttatgcgtccaggcgaagaagcttatcgccagattgtagctgcgttcggtccgggcattcttcgtgccgatggcgagatcgatcgccagaaactgggtgctatccgcttttcggacgaacaacaacgtaaggtgctgaatgcgattgtaggtcctgcagtcctgaagaagatgctcgctgagaaagaagctcatatccgctcaggcgccaagacggttgtgctggatatcccgctgctgttcgaatccggattgacccattgggtcgacaaagtgctcgtggtgtacgtcgatgatgatgttcagttacgccgccttatggcacgtaacgggtttactattgaagaagctctgaagcgcattcgttcacagtggcccagtgcggagaaagttaaacgtgcagacgctgtcatcgacaataatggcacgattgaagaaacccgccgccagctgctggccattttacaccagtgggatctgctgggtaagggtggctccggccaccatcatcaccatcac

SEQ ID NO: 886 - protein, 211 aa, synthetic construct
  REGION 1..211: note = Variant of 3'O-kinase
MAFTIGLTGGIAAGKSTVSAMMRELGLPVIDADEAARAVMRPGEEAYRQIVAAFGPGILRADGEIDRQKLGAIRFSDEQQRKVLNAIVGPAVLKKMLAEKEAHIRSGAKTVVLDIPLLFESGLTHWVDKVLVVYVDDDVQLRRLMARNGFTIEEALKRIRSQWPSAEKVKRADAVIDNNGTIEETRRQLLAILHQWDLLGKGGSGHHHHHH

SEQ ID NO: 887 - DNA, 633 bp, synthetic construct
  misc_feature 1..633: note = Variant of 3'O-kinase
  source 1..633: mol_type = other DNA
atggcgtttaccattggtttaacaggagggatcgcagcgggcaaatcgactgtgagtgccatgatgcgtgaactgggtctgccggtcatcgatgctgacgaggcagcacgcgccgttatgcgtccaggcgaagaagcttatcgccagattgtagctgcgttcggtccgggcattcttcgtgccgatggcgagatcgatcgccagaaactgggtgctatccgcttttcggacgaacaacaacgtaaggtgctgaatgcgattgtaggtcctgcagtcctgaagaagatgctcgctgagaaagaagctcatatccgctcaggcgccaagacggttgtgctggatatcccgctgctgttcgaatccggattgacccattgggtcgacaaagtgctcgtggtgtacgtcgatgatgatgttcagttacgccgccttatggcacgtaacgggtttactgaagaagaagctctgaagcgcattcgttcacagtggcccagtgcggagaaagttaaacgtgcagacgctgtcatcgacaataatggcacgattgaagaaacccgccgccagctgctggccattttacaccagtgggatctggttggtaagggtggctccggccaccatcatcaccatcac

SEQ ID NO: 888 - protein, 211 aa, synthetic construct
  REGION 1..211: note = Variant of 3'O-kinase
MAFTIGLTGGIAAGKSTVSAMMRELGLPVIDADEAARAVMRPGEEAYRQIVAAFGPGILRADGEIDRQKLGAIRFSDEQQRKVLNAIVGPAVLKKMLAEKEAHIRSGAKTVVLDIPLLFESGLTHWVDKVLVVYVDDDVQLRRLMARNGFTEEEALKRIRSQWPSAEKVKRADAVIDNNGTIEETRRQLLAILHQWDLVGKGGSGHHHHHH

SEQ ID NO: 889 - DNA, 633 bp, synthetic construct
  misc_feature 1..633: note = Variant of 3'O-kinase
  source 1..633: mol_type = other DNA
atggcgtttaccattggtttaacaggagggatcgcagcgggcaaatcgactgtgagtgccatgatgcgtgaactgggtctgccggtcatcgatgctgacgaggcagcacgcgccgttatgcgtccaggcgaagaagcttatcgccagattgtagctgcgttcggtccgggcattcttcgtgccgatggcgagatcgatcgccagaaactgggtgctatccgcttttcggacgaacaacaacgtaaggtgctgaatgcgattgtaggtcctgcaactctgaagaagatgctcgctgagaaagaagctcatatccgctcaggcgccaagacggttgtgctggatatcccgctgctgttcgaatccggattgacccattgggtcgacaaagtgctcgtggtgtacgtcgatgatgatgttcagttacgccgccttatggcacgtaacgggtttactgaagaagaagctctgaagcgcattcgttcacagtggcccagtgcggagaaagttaaacgtgcagacgctgtcatcgacaataatggcacgattgaagaaacccgccgccagctgctggccattttacaccagtgggatctgctgggtaagggtggctccggccaccatcatcaccatcac

SEQ ID NO: 890 - protein, 211 aa, synthetic construct
  REGION 1..211: note = Variant of 3'O-kinase
MAFTIGLTGGIAAGKSTVSAMMRELGLPVIDADEAARAVMRPGEEAYRQIVAAFGPGILRADGEIDRQKLGAIRFSDEQQRKVLNAIVGPATLKKMLAEKEAHIRSGAKTVVLDIPLLFESGLTHWVDKVLVVYVDDDVQLRRLMARNGFTEEEALKRIRSQWPSAEKVKRADAVIDNNGTIEETRRQLLAILHQWDLLGKGGSGHHHHHH

SEQ ID NO: 891 - DNA, 633 bp, synthetic construct
  misc_feature 1..633: note = Variant of 3'O-kinase
  source 1..633: mol_type = other DNA
atggcgtttaccatttggttaacaggagggatcgcagcgggcaaatcgactgtgagtgccatgatgcgtgaactgggtctgccggtcatcgatgctgacgaggcagcacgcgccgttatgcgtccaggcgaagaagcttatcgccagattgtagctgcgttcggtccgggcattcttcgtgccgatggcgagatcgatcgccagaaactgggtgctatccgcttttcggacgaacaacaacgtaaggtgctgaatgcgattgtaggtcctgcagtcctgaagaagatgctcgctgagaaagaagctcatatccgctcaggcgccaagacggttgtgctggatatcccgctgctgttcgaatccggattgacccattgggtcgacaaagtgctcgtggtgtacgtcgatgatgatgttcagttacgccgccttatggcacgtaacgggtttactgaagaagaagctctgaagcgcattcgttcacagtggcccagtgcggagaaagttaaacgtgcagacgctgtcatcgacaataatggcacgattgaagaaacccgccgccagctgctggccattttacaccagtgggatctgctgggtaagggtggctccggccaccatcatcaccatcac

SEQ ID NO: 892 - protein, 211 aa, synthetic construct
  REGION 1..211: note = Variant of 3'O-kinase
MAFTIWLTGGIAAGKSTVSAMMRELGLPVIDADEAARAVMRPGEEAYRQIVAAFGPGILRADGEIDRQKLGAIRFSDEQQRKVLNAIVGPAVLKKMLAEKEAHIRSGAKTVVLDIPLLFESGLTHWVDKVLVVYVDDDVQLRRLMARNGFTEEEALKRIRSQWPSAEKVKRADAVIDNNGTIEETRRQLLAILHQWDLLGKGGSGHHHHHH

SEQ ID NO: 893 - DNA, 633 bp, synthetic construct
  misc_feature 1..633: note = Variant of 3'O-kinase
  source 1..633: mol_type = other DNA
atggtgtttaccattggtttaacaggagggatcgcagcgggcaaatcgactgtgagtgccatgatgcgtgaactgggtctgccggtcatcgatgctgacgaggcagcacgcgccgttatgcgtccaggcgaagaagcttatcgccagattgtagctgcgttcggtccgggcattcttcgtgccgatggcgagatcgatcgccagaaactgggtgctatccgcttttcggacgaacaacaacgtaaggtgctgaatgcgattgtaggtcctgcagtcctgaagaagatgctcgctgagaaagaagctcatatccgctcaggcgccaagacggttgtgctggatatcccgctgctgttcgaatccggattgacccattgggtcgacaaagtgctcgtggtgtacgtcgatgatgatgttcagttacgccgccttatggcacgtaacgggtttactgaagaagaagctctgaagcgcattcgttcacagtggcccagtgcggagaaagttaaacgtgcagacgctgtcatcgacaataatggcacgattgaagaaacccgccgccagctgctggccattttacaccagtgggatctgctgggtaagggtggctccggccaccatcatcaccatcac

SEQ ID NO: 894 - protein, 211 aa, synthetic construct
  REGION 1..211: note = Variant of 3'O-kinase
MVFTIGLTGGIAAGKSTVSAMMRELGLPVIDADEAARAVMRPGEEAYRQIVAAFGPGILRADGEIDRQKLGAIRFSDEQQRKVLNAIVGPAVLKKMLAEKEAHIRSGAKTVVLDIPLLFESGLTHWVDKVLVVYVDDDVQLRRLMARNGFTEEEALKRIRSQWPSAEKVKRADAVIDNNGTIEETRRQLLAILHQWDLLGKGGSGHHHHHH

SEQ ID NO: 895 - DNA, 633 bp, synthetic construct
  misc_feature 1..633: note = Variant of 3'O-kinase
  source 1..633: mol_type = other DNA
atggcgtttaccattggtttaacaggagggatcgcagcgggcaaatcgactgtgagtgccatgatgcgtgaactgggtctgccggtcatcgatgctgacgaggcagcacgcgccgttatgcgtccaggcgaagaagcttatcgccagattgtagctgcgttcggtccgggcattcttcgtgccgatggcgagatcgatcgccagaaactgggtgctatccgcttttcggacgaacaacaacgtaaggtgctgaatgcgattgtaggtcctgcagtcctgaagaagatgctcgctgagaaagaagctcatatccgctcaggcgccaagacggttgtgctggatatcccgctgctgttcgaatccggattgacccattgggtcgacaaagtgctcgtggtgtacgtcgatgatgatgttcagttacgccgccttatggcacgtaacgggtttactgaagaagaagctctgaagcgcattcgttcacagtggcccagtgcggagaaagttaaacgtgcagacgctgtcatcgacaataatggcacgattgaagaaacccgccgccagctgctggccattttacactcgtgggatctgctgggtaagggtggctccggccaccatcatcaccatcac

SEQ ID NO: 896 - protein, 211 aa, synthetic construct
  REGION 1..211: note = Variant of 3'O-kinase
MAFTIGLTGGIAAGKSTVSAMMRELGLPVIDADEAARAVMRPGEEAYRQIVAAFGPGILRADGEIDRQKLGAIRFSDEQQRKVLNAIVGPAVLKKMLAEKEAHIRSGAKTVVLDIPLLFESGLTHWVDKVLVVYVDDDVQLRRLMARNGFTEEEALKRIRSQWPSAEKVKRADAVIDNNGTIEETRRQLLAILHSWDLLGKGGSGHHHHHH

SEQ ID NO: 897 - DNA, 633 bp, synthetic construct
  misc_feature 1..633: note = Variant of 3'O-kinase
  source 1..633: mol_type = other DNA
atggcgtttaccattggtttaacaggagggatcgcagcgggcaaatcgactgtgagtgccatgatgcgtgaactgggtctgccggtcatcgatgctgacgaggcagcacgcgccgttatgcgtccaggcgaagaagcttatcgccagattgtagctgcgttcggtccgggcattcttcgtgccgatggcgagatcgatcgccagaaactgggtgctatccgcttttcggacgaacaacaacgtaaggtgctgaatgcgattgtaggtcctgcagtcctgaagaagatgctcgctgagaaagaagctcatatccgctcaggcgccaagacggttgtgctggatatcccgctgctgttcgaatccggattgacccattgggtcgacaaagtgctcgtggtgtacgtcgatgatgatgttcagttacgccgccttatggcacgtaacgggtttactgaagaagaagctctgaagcgcattcgttcacagtggcccagtgcggagaaagttaaacgtgcagacgctgtcatcgacaataatggcacgattgaagaaacccgccgccagctgctggccattttaggtcagtgggatctgctgggtaagggtggctccggccaccatcatcaccatcac

SEQ ID NO: 898 - protein, 211 aa, synthetic construct
  REGION 1..211: note = Variant of 3'O-kinase
MAFTIGLTGGIAAGKSTVSAMMRELGLPVIDADEAARAVMRPGEEAYRQIVAAFGPGILRADGEIDRQKLGAIRFSDEQQRKVLNAIVGPAVLKKMLAEKEAHIRSGAKTVVLDIPLLFESGLTHWVDKVLVVYVDDDVQLRRLMARNGFTEEEALKRIRSQWPSAEKVKRADAVIDNNGTIEETRRQLLAILGQWDLLGKGGSGHHHHHH

SEQ ID NO: 899 - DNA, 633 bp, synthetic construct
  misc_feature 1..633: note = Variant of 3'O-kinase
  source 1..633: mol_type = other DNA
atggcgtttaccattggtttaacaggagggatcgcagcgggcaaatcgactgtgagtgccatgatgcgtgaactgggtctgccggtcatcgatgctgacgaggcagcacgcgccgttatgcgtccaggcgaagaagcttatcgccagattgtagctgcgttcggtccgggcattcttcgtgccgatggcgagatcgatcgccagaaactgggtgctatccgcttttcggacgaacaacaacgtaaggtgctgaatgcgattgtaggtcctgcagtcctgaagaagatgctcgctgagaaagaagctcatatccgctcaggcgccaagacggttgtgctggatatcccgctgctgttcgaatccggattgacccattgggtcgacaaagtgctcgtggtgtacgtcgatgatgatgttcagttacgccgccttatggcacgtaacgggtttactgaagaagaagctctgaagcgcattcgttcacagtggcccagtgcggagaaagttaaacgtgcagacgctgtcatcgacaataatggcacgattgaagaaacccgccgccagctgctggccattttacaccagtgggatctgctgggtaagggtaggtccggccaccatcatcaccatcac

SEQ ID NO: 900 - protein, 211 aa, synthetic construct
  REGION 1..211: note = Variant of 3'O-kinase
MAFTIGLTGGIAAGKSTVSAMMRELGLPVIDADEAARAVMRPGEEAYRQIVAAFGPGILRADGEIDRQKLGAIRFSDEQQRKVLNAIVGPAVLKKMLAEKEAHIRSGAKTVVLDIPLLFESGLTHWVDKVLVVYVDDDVQLRRLMARNGFTEEEALKRIRSQWPSAEKVKRADAVIDNNGTIEETRRQLLAILHQWDLLGKGRSGHHHHHH

SEQ ID NO: 901 - DNA, 633 bp, synthetic construct
  misc_feature 1..633: note = Variant of 3'O-kinase
  source 1..633: mol_type = other DNA
atggcgtttaccattggtttaacaggagggatcgcagcgggcaaatcgactgtgagtgccatgatgcgtgaactgactctgccggtcatcgatgctgacgaggcagcacgcgccgttatgcgtccaggcgaagaagcttatcgccagattgtagctgcgttcggtccgggcattcttcgtgccgatggcgagatcgatcgccagaaactgggtgctatccgcttttcggacgaacaacaacgtaaggtgctgaatgcgattgtaggtcctgcagtcctgaagaagatgctcgctgagaaagaagctcatatccgctcaggcgccaagacggttgtgctggatatcccgctgctgttcgaatccggattgacccattgggtcgacaaagtgctcgtggtgtacgtcgatgatgatgttcagttacgccgccttatggcacgtaacgggtttactgaagaagaagctctgaagcgcattcgttcacagtggcccagtgcggagaaagttaaacgtgcagacgctgtcatcgacaataatggcacgattgaagaaacccgccgccagctgctggccattttacaccagtgggatctgctgggtaagggtggctccggccaccatcatcaccatcac

SEQ ID NO: 902 - protein, 211 aa, synthetic construct
  REGION 1..211: note = Variant of 3'O-kinase
MAFTIGLTGGIAAGKSTVSAMMRELTLPVIDADEAARAVMRPGEEAYRQIVAAFGPGILRADGEIDRQKLGAIRFSDEQQRKVLNAIVGPAVLKKMLAEKEAHIRSGAKTVVLDIPLLFESGLTHWVDKVLVVYVDDDVQLRRLMARNGFTEEEALKRIRSQWPSAEKVKRADAVIDNNGTIEETRRQLLAILHQWDLLGKGGSGHHHHHH

SEQ ID NO: 903 - DNA, 633 bp, synthetic construct
  misc_feature 1..633: note = Variant of 3'O-kinase
  source 1..633: mol_type = other DNA
atggcgtttaccattggtttaacaggagggatcgcagcgggcaaatcgactgtgagtgccatgatgcgtgaactgggtctgccggtcatcgatgctgacgaggcagcacgcgccgttatgcgtccaggcgaagaagcttatcgccagattgtagctgcgttcggtccgggcattcttcgtgccgatggcgagatcgatcgccagaaactgggtgctatccgcttttcggacgaacaacaacgtaaggtgctgaatgcgattgtaggtcctgcagtcctgaagaagatgctcgctgagaaagaagctcatatccgctcaggcgccaagacggttgtgctggatatcccgctgctgttcgaatccggattgacccattgggtcgacaaagtgctcgtggtgtacgtcgatgatgatgttcagttacgccgccttatggcacgtaacgggtttactgaagaagaagctctgaagcgcattcgttcacagtggcccagtgcggagaaagttaaaacggcagacgctgtcatcgacaataatggcacgattgaagaaacccgccgccagctgctggccattttacaccagtgggatctgctgggtaagggtggctccggccaccatcatcaccatcac

SEQ ID NO: 904 - protein, 211 aa, synthetic construct
  REGION 1..211: note = Variant of 3'O-kinase
MAFTIGLTGGIAAGKSTVSAMMRELGLPVIDADEAARAVMRPGEEAYRQIVAAFGPGILRADGEIDRQKLGAIRFSDEQQRKVLNAIVGPAVLKKMLAEKEAHIRSGAKTVVLDIPLLFESGLTHWVDKVLVVYVDDDVQLRRLMARNGFTEEEALKRIRSQWPSAEKVKTADAVIDNNGTIEETRRQLLAILHQWDLLGKGGSGHHHHHH

SEQ ID NO: 905 - DNA, 633 bp, synthetic construct
  misc_feature 1..633: note = Variant of 3'O-kinase
  source 1..633: mol_type = other DNA
atggcgtttaccattggtttaacaggagggatcgcagcgggcaaatcgactgtgagtgccatgatgcgtgaactgggtctgccggtcatcgatgctgacgaggcagcacgcgccgttatgcgtccaggcgaagaagcttatcgccagattgtagctgcgttcggtccgggcattcttcgtgccgatggcgagatcgatcgccagaaactgggtgctatccgcttttcggacgaacaacaacgtaaggtgctgaatgcgattgtaggtcctgcagtcctgaagaagatgctcgctgagaaagaagctcatatccgctcaggcgccaagacggttgtgctggatatcccgctgctgttcgaatccggattgacccattgggtcgacaaagtgctcgtggtgtacgtcgatgatgatgcgcagttacgccgccttatggcacgtaacgggtttactgaagaagaagctctgaagcgcattcgttcacagtggcccagtgcggagaaagttaaacgtgcagacgctgtcatcgacaataatggcacgattgaagaaacccgccgccagctgctggccattttacaccagtgggatctgctgggtaagggtggctccggccaccatcatcaccatcac

SEQ ID NO: 906 - protein, 211 aa, synthetic construct
  REGION 1..211: note = Variant of 3'O-kinase
MAFTIGLTGGIAAGKSTVSAMMRELGLPVIDADEAARAVMRPGEEAYRQIVAAFGPGILRADGEIDRQKLGAIRFSDEQQRKVLNAIVGPAVLKKMLAEKEAHIRSGAKTVVLDIPLLFESGLTHWVDKVLVVYVDDDAQLRRLMARNGFTEEEALKRIRSQWPSAEKVKRADAVIDNNGTIEETRRQLLAILHQWDLLGKGGSGHHHHHH

SEQ ID NO: 907 - DNA, 633 bp, synthetic construct
  misc_feature 1..633: note = Variant of 3'O-kinase
  source 1..633: mol_type = other DNA
atggcgtttaccattggtttaacaggagggatcgcagcgggcaaatcgactgtgagtgccatgatgcgtgaactgggtctgccggtcatcgatgctgacgaggcagcacgcgccgttatgcgtccaggcgaagaagcttatcgccagattgtagctgcgttcggtccgggcattcttcgtgccgatggcgagatcgatcgccagaaactgggtgctatccgcttttcggacgaacaacaacgtaaggtgctgaatgcgattgtaggtcctgcagtcctgaagaagatgctcgctgagaaagaagctcatatccgctcaggcgccaagacggttgtgctggatatcccgctgctgttcgaatccggattgacccattgggtcgacaaagtgctcgtggtgtacgtcgatgatgatgttcagttacgccgccttatggcacgtaacgggtttactgaagaagaagctctgaagcgcattcgttcacagtggcccagtgcggagaaagttaaacgtgcagacgctgtcatcgacaataatggcacgattgaagaaacccgccgccagctgctggccattttacaccagtgggatctgctgggtaagggtctgtccggccaccatcatcaccatcac

SEQ ID NO: 908 - protein, 211 aa, synthetic construct
  REGION 1..211: note = Variant of 3'O-kinase
MAFTIGLTGGIAAGKSTVSAMMRELGLPVIDADEAARAVMRPGEEAYRQIVAAFGPGILRADGEIDRQKLGAIRFSDEQQRKVLNAIVGPAVLKKMLAEKEAHIRSGAKTVVLDIPLLFESGLTHWVDKVLVVYVDDDVQLRRLMARNGFTEEEALKRIRSQWPSAEKVKRADAVIDNNGTIEETRRQLLAILHQWDLLGKGLSGHHHHHH

SEQ ID NO: 909 - DNA, 633 bp, synthetic construct
  misc_feature 1..633: note = Variant of 3'O-kinase
  source 1..633: mol_type = other DNA
atggcgtttaccattggtttaacaggagggatcgcagcgggcaaatcgactgtgagtgccatgatgcgtgaactgggtctgccggtcatcgatgctgacgaggcagcacgcgccgttatgcgtccaggcgaagaagcttatcgccagattgtagctgcgttcggtccgggcattcttcgtgccgatggcgagatcgatcgccagaaactgggtgctatccgcttttcggacgaacaacaacgtaaggtgccgaatgcgattgtaggtcctgcagtcctgaagaagatgctcgctgagaaagaagctcatatccgctcaggcgccaagacggttgtgctggatatcccgctgctgttcgaatccggattgacccattgggtcgacaaagtgctcgtggtgtacgtcgatgatgatgttcagttacgccgccttatggcacgtaacgggtttactgaagaagaagctctgaagcgcattcgttcacagtggcccagtgcggagaaagttaaacgtgcagacgctgtcatcgacaataatggcacgattgaagaaacccgccgccagctgctggccattttacaccagtgggatctgctgggtaagggtggctccggccaccatcatcaccatcac

SEQ ID NO: 910 - protein, 211 aa, synthetic construct
  REGION 1..211: note = Variant of 3'O-kinase
MAFTIGLTGGIAAGKSTVSAMMRELGLPVIDADEAARAVMRPGEEAYRQIVAAFGPGILRADGEIDRQKLGAIRFSDEQQRKVPNAIVGPAVLKKMLAEKEAHIRSGAKTVVLDIPLLFESGLTHWVDKVLVVYVDDDVQLRRLMARNGFTEEEALKRIRSQWPSAEKVKRADAVIDNNGTIEETRRQLLAILHQWDLLGKGGSGHHHHHH

SEQ ID NO: 911 - DNA, 633 bp, synthetic construct
  misc_feature 1..633: note = Variant of 3'O-kinase
  source 1..633: mol_type = other DNA
atggcgtttaccattggtttaacaggagggatcgcagcgggcaaatcgactgtgagtgccatgatgcgtgaactgggtctgccggtcatcgatgctgacgaggcagcacgcgccgttatgcgtccaggcgaagaagcttatcgccagattgtagctgcgttcggtccgggcattcttcgttatgatggcgagatcgatcgccagaaactgggtgctatccgcttttcggacgaacaacaacgtaaggtgctgaatgcgattgtaggtcctgcagtcctgaagaagatgctcgctgagaaagaagctcatatccgctcaggcgccaagacggttgtgctggatatcccgctgctgttcgaatccggattgacccattgggtcgacaaagtgctcgtggtgtacgtcgatgatgatgttcagttacgccgccttatggcacgtaacgggtttactgaagaagaagctctgaagcgcattcgttcacagtggcccagtgcggagaaagttaaacgtgcagacgctgtcatcgacaataatggcacgattgaagaaacccgccgccagctgctggccattttacaccagtgggatctgctgggtaagggtggctccggccaccatcatcaccatcac

SEQ ID NO: 912 - protein, 211 aa, synthetic construct
  REGION 1..211: note = Variant of 3'O-kinase
MAFTIGLTGGIAAGKSTVSAMMRELGLPVIDADEAARAVMRPGEEAYRQIVAAFGPGILRYDGEIDRQKLGAIRFSDEQQRKVLNAIVGPAVLKKMLAEKEAHIRSGAKTVVLDIPLLFESGLTHWVDKVLVVYVDDDVQLRRLMARNGFTEEEALKRIRSQWPSAEKVKRADAVIDNNGTIEETRRQLLAILHQWDLLGKGGSGHHHHHH

SEQ ID NO: 913 - DNA, 633 bp, synthetic construct
  misc_feature 1..633: note = Variant of 3'O-kinase
  source 1..633: mol_type = other DNA
atggcgtttaccattggtttaacaggagggatcgcagcgggcaaatcgactgtgagtgccatgatgcgtgaactgggtctgccggtcatcgatgctgacgaggcagcacgcgccgttatgcgtccaggcgaagaagcttatcgccagattgtagctaggttcggtccgggcattcttcgtgccgatggcgagatcgatcgccagaaactgggtgctatccgcttttcggacgaacaacaacgtaaggtgctgaatgcgattgtaggtcctgcagtcctgaagaagatgctcgctgagaaagaagctcatatccgctcaggcgccaagacggttgtgctggatatcccgctgctgttcgaatccggattgacccattgggtcgacaaagtgctcgtggtgtacgtcgatgatgatgttcagttacgccgccttatggcacgtaacgggtttactgaagaagaagctctgaagcgcattcgttcacagtggcccagtgcggagaaagttaaacgtgcagacgctgtcatcgacaataatggcacgattgaagaaacccgccgccagctgctggccattttacaccagtgggatctgctgggtaagggtggctccggccaccatcatcaccatcac

SEQ ID NO: 914 - protein, 211 aa, synthetic construct
  REGION 1..211: note = Variant of 3'O-kinase
MAFTIGLTGGIAAGKSTVSAMMRELGLPVIDADEAARAVMRPGEEAYRQIVARFGPGILRADGEIDRQKLGAIRFSDEQQRKVLNAIVGPAVLKKMLAEKEAHIRSGAKTVVLDIPLLFESGLTHWVDKVLVVYVDDDVQLRRLMARNGFTEEEALKRIRSQWPSAEKVKRADAVIDNNGTIEETRRQLLAILHQWDLLGKGGSGHHHHHH

SEQ ID NO: 915 - DNA, 633 bp, synthetic construct
  misc_feature 1..633: note = Variant of 3'O-kinase
  source 1..633: mol_type = other DNA
atggcgtttaccattggttcgacaggagggatcgcagcgggcaaatcgactgtgagtgccatgatgcgtgaactgggtctgccggtcatcgatgctgacgaggcagcacgcgccgttatgcgtccaggcgaagaagcttatcgccagattgtagctgcgttcggtccgggcattcttcgtgccgatggcgagatcgatcgccagaaactgggtgctatccgcttttcggacgaacaacaacgtaaggtgctgaatgcgattgtaggtcctgcagtcctgaagaagatgctcgctgagaaagaagctcatatccgctcaggcgccaagacggttgtgctggatatcccgctgctgttcgaatccggattgacccattgggtcgacaaagtgctcgtggtgtacgtcgatgatgatgttcagttacgccgccttatggcacgtaacgggtttactgaagaagaagctctgaagcgcattcgttcacagtggcccagtgcggagaaagttaaacgtgcagacgctgtcatcgacaataatggcacgattgaagaaacccgccgccagctgctggccattttacaccagtgggatctgctgggtaagggtggctccggccaccatcatcaccatcac

SEQ ID NO: 916 - protein, 211 aa, synthetic construct
  REGION 1..211: note = Variant of 3'O-kinase
MAFTIGSTGGIAAGKSTVSAMMRELGLPVIDADEAARAVMRPGEEAYRQIVAAFGPGILRADGEIDRQKLGAIRFSDEQQRKVLNAIVGPAVLKKMLAEKEAHIRSGAKTVVLDIPLLFESGLTHWVDKVLVVYVDDDVQLRRLMARNGFTEEEALKRIRSQWPSAEKVKRADAVIDNNGTIEETRRQLLAILHQWDLLGKGGSGHHHHHH

SEQ ID NO: 917 - DNA, 633 bp, synthetic construct
  misc_feature 1..633: note = Variant of 3'O-kinase
  source 1..633: mol_type = other DNA
atggcgtttaccattggtttaacaggagggatcgcagcgggcaaatcgactgtgagtgccatgatgcgtgaactgggtctgccggtcatcgatgctgacgaggcagcacgcgccgttatgcgtccaggcgaagaagcttatcgccagattgtagctgcgttcggtccgggcattcttctggccgatggcgagatcgatcgccagaaactgggtgctatccgcttttcggacgaacaacaacgtaaggtgctgaatgcgattgtaggtcctgcagtcctgaagaagatgctcgctgagaaagaagctcatatccgctcaggcgccaagacggttgtgctggatatcccgctgctgttcgaatccggattgacccattgggtcgacaaagtgctcgtggtgtacgtcgatgatgatgttcagttacgccgccttatggcacgtaacgggtttactgaagaagaagctctgaagcgcattcgttcacagtggcccagtgcggagaaagttaaacgtgcagacgctgtcatcgacaataatggcacgattgaagaaacccgccgccagctgctggccattttacaccagtgggatctgctgggtaagggtggctccggccaccatcatcaccatcac

SEQ ID NO: 918 - protein, 211 aa, synthetic construct
  REGION 1..211: note = Variant of 3'O-kinase
MAFTIGLTGGIAAGKSTVSAMMRELGLPVIDADEAARAVMRPGEEAYRQIVAAFGPGILLADGEIDRQKLGAIRFSDEQQRKVLNAIVGPAVLKKMLAEKEAHIRSGAKTVVLDIPLLFESGLTHWVDKVLVVYVDDDVQLRRLMARNGFTEEEALKRIRSQWPSAEKVKRADAVIDNNGTIEETRRQLLAILHQWDLLGKGGSGHHHHHH

SEQ ID NO: 919 - DNA, 633 bp, synthetic construct
  misc_feature 1..633: note = Variant of 3'O-kinase
  source 1..633: mol_type = other DNA
atggcgtttaccattggtttaacaggagggatcgcagcgggcaaatcgactgtgagtgccatgatgcgtgaactgggtctgccggtcatcgatgctgacgaggcagcacgcgccgttatgcgtccaggcgaagaagcttatcgccagattgtagctgcgttcggtccgggcattcttcgtgccgatggcgagatcgatcgccagaaactgggtgctatccgcttttcggacgaacaacaacgtaaggtgctgaatgcgattgtaggtcctgcagtcctgaagaagatgctcgctgagaaagaagctcatatccgctcaggcgccaagacggttgtgctggatatcccgctgctgttcgaatccggattgacccattgggtcgacaaagtgctcgtggtgtacgtcgatgatgatgttcagttacgccgccttatggcacgtaacgggtttactgaagaagaagctctgaagcgcattcgttcacagtggcccagtgcggagaaagttaaagtggcagacgctgtcatcgacaataatggcacgattgaagaaacccgccgccagctgctggccattttacaccagtgggatctgctgggtaagggtggctccggccaccatcatcaccatcac

SEQ ID NO: 920 - protein, 211 aa, synthetic construct
  REGION 1..211: note = Variant of 3'O-kinase
MAFTIGLTGGIAAGKSTVSAMMRELGLPVIDADEAARAVMRPGEEAYRQIVAAFGPGILRADGEIDRQKLGAIRFSDEQQRKVLNAIVGPAVLKKMLAEKEAHIRSGAKTVVLDIPLLFESGLTHWVDKVLVVYVDDDVQLRRLMARNGFTEEEALKRIRSQWPSAEKVKVADAVIDNNGTIEETRRQLLAILHQWDLLGKGGSGHHHHHH

SEQ ID NO: 921 - DNA, 633 bp, synthetic construct
  misc_feature 1..633: note = Variant of 3'O-kinase
  source 1..633: mol_type = other DNA
atggcgtttaccactggtttaacaggagggatcgcagcgggcaaatcgactgtgagtgccatgatgcgtgaactgggtctgccggtcatcgatgctgacgaggcagcacgcgccgttatgcgtccaggcgaagaagcttatcgccagattgtagctgcgttcggtccgggcattcttcgtgccgatggcgagatcgatcgccagaaactgggtgctatccgcttttcggacgaacaacaacgtaaggtgctgaatgcgattgtaggtcctgcagtcctgaagaagatgctcgctgagaaagaagctcatatccgctcaggcgccaagacggttgtgctggatatcccgctgctgttcgaatccggattgacccattgggtcgacaaagtgctcgtggtgtacgtcgatgatgatgttcagttacgccgccttatggcacgtaacgggtttactgaagaagaagctctgaagcgcattcgttcacagtggcccagtgcggagaaagttaaacgtgcagacgctgtcatcgacaataatggcacgattgaagaaacccgccgccagctgctggccattttacaccagtgggatctgctgggtaagggtggctccggccaccatcatcaccatcac

SEQ ID NO: 922 - protein, 211 aa, synthetic construct
  REGION 1..211: note = Variant of 3'O-kinase
MAFTTGLTGGIAAGKSTVSAMMRELGLPVIDADEAARAVMRPGEEAYRQIVAAFGPGILRADGEIDRQKLGAIRFSDEQQRKVLNAIVGPAVLKKMLAEKEAHIRSGAKTVVLDIPLLFESGLTHWVDKVLVVYVDDDVQLRRLMARNGFTEEEALKRIRSQWPSAEKVKRADAVIDNNGTIEETRRQLLAILHQWDLLGKGGSGHHHHHH

SEQ ID NO: 923 - DNA, 633 bp, synthetic construct
  misc_feature 1..633: note = Variant of 3'O-kinase
  source 1..633: mol_type = other DNA
atggcgtttaccattggtttaacaggagggatcgcagcgggcaaatcgactgtgagtgccatgatgcgtgaactgggtctgccggtcatcgatgctgacgaggcagcacgcgccgttatgcgtccaggcgaagaagcttatcgccagattgtagctgcgttcggtccgggcattcttcgtgccgatggcgagatcgatcgccagaaactgggtgctatccgcttttcggacgaacaacaacgtaaggtgctgaatgcgattgtaggtcctgcagtcctgaagaagatgctcgctgagaaagaagctcatatccgctcaggcgccaagacggttgtgctggatatcccgctgctgttcgaatccggattgacccatatggtcgacaaagtgctcgtggtgtacgtcgatgatgatgttcagttacgccgccttatggcacgtaacgggtttactgaagaagaagctctgaagcgcattcgttcacagtggcccagtgcggagaaagttaaacgtgcagacgctgtcatcgacaataatggcacgattgaagaaacccgccgccagctgctggccattttacaccagtgggatctgctgggtaagggtggctccggccaccatcatcaccatcac

SEQ ID NO: 924 - protein, 211 aa, synthetic construct
  REGION 1..211: note = Variant of 3'O-kinase
MAFTIGLTGGIAAGKSTVSAMMRELGLPVIDADEAARAVMRPGEEAYRQIVAAFGPGILRADGEIDRQKLGAIRFSDEQQRKVLNAIVGPAVLKKMLAEKEAHIRSGAKTVVLDIPLLFESGLTHMVDKVLVVYVDDDVQLRRLMARNGFTEEEALKRIRSQWPSAEKVKRADAVIDNNGTIEETRRQLLAILHQWDLLGKGGSGHHHHHH

SEQ ID NO: 925 - DNA, 633 bp, synthetic construct
  misc_feature 1..633: note = Variant of 3'O-kinase
  source 1..633: mol_type = other DNA
atggcgtttaccattggtttaacaggagggatcgcagcgggcaaatcgactgtgagtgccatgatgcgtgaactgggtctgccggtcatcgataaggacgaggcagcacgcgccgttatgcgtccaggcgaagaagcttatcgccagattgtagctgcgttcggtccgggcattcttcgtgccgatggcgagatcgatcgccagaaactgggtgctatccgcttttcggacgaacaacaacgtaaggtgctgaatgcgattgtaggtcctgcagtcctgaagaagatgctcgctgagaaagaagctcatatccgctcaggcgccaagacggttgtgctggatatcccgctgctgttcgaatccggattgacccattgggtcgacaaagtgctcgtggtgtacgtcgatgatgatgttcagttacgccgccttatggcacgtaacgggtttactgaagaagaagctctgaagcgcattcgttcacagtggcccagtgcggagaaagttaaacgtgcagacgctgtcatcgacaataatggcacgattgaagaaacccgccgccagctgctggccattttacaccagtgggatctgctgggtaagggtggctccggccaccatcatcaccatcac

SEQ ID NO: 926 - protein, 211 aa, synthetic construct
  REGION 1..211: note = Variant of 3'O-kinase
MAFTIGLTGGIAAGKSTVSAMMRELGLPVIDKDEAARAVMRPGEEAYRQIVAAFGPGILRADGEIDRQKLGAIRFSDEQQRKVLNAIVGPAVLKKMLAEKEAHIRSGAKTVVLDIPLLFESGLTHWVDKVLVVYVDDDVQLRRLMARNGFTEEEALKRIRSQWPSAEKVKRADAVIDNNGTIEETRRQLLAILHQWDLLGKGGSGHHHHHH

SEQ ID NO: 927 - DNA, 633 bp, synthetic construct
  misc_feature 1..633: note = Variant of 3'O-kinase
  source 1..633: mol_type = other DNA
atggcgtttaccattggtttaacaggagggatcgcagcgggcaaatcgactgtgagtgccatgatgcgtgaactgggtctgccggtcatcgatgctgacgaggcagcacgcgccgttatgcgtccaggcgaagaagcttatcgccagattgtagctgcgttcggtccgggcattcttcgtgccgatggcgagatcgatcgccagaaactgggtgctatccgcttttcggacgaacaacaacgtaaggtgctggttgcgattgtaggtcctgcagtcctgaagaagatgctcgctgagaaagaagctcatatccgctcaggcgccaagacggttgtgctggatatcccgctgctgttcgaatccggattgacccattgggtcgacaaagtgctcgtggtgtacgtcgatgatgatgttcagttacgccgccttatggcacgtaacgggtttactgaagaagaagctctgaagcgcattcgttcacagtggcccagtgcggagaaagttaaacgtgcagacgctgtcatcgacaataatggcacgattgaagaaacccgccgccagctgctggccattttacaccagtgggatctgctgggtaagggtggctccggccaccatcatcaccatcac

SEQ ID NO: 928 - protein, 211 aa, synthetic construct
  REGION 1..211: note = Variant of 3'O-kinase
MAFTIGLTGGIAAGKSTVSAMMRELGLPVIDADEAARAVMRPGEEAYRQIVAAFGPGILRADGEIDRQKLGAIRFSDEQQRKVLVAIVGPAVLKKMLAEKEAHIRSGAKTVVLDIPLLFESGLTHWVDKVLVVYVDDDVQLRRLMARNGFTEEEALKRIRSQWPSAEKVKRADAVIDNNGTIEETRRQLLAILHQWDLLGKGGSGHHHHHH

SEQ ID NO: 929 - DNA, 633 bp, synthetic construct
  misc_feature 1..633: note = Variant of 3'O-kinase
  source 1..633: mol_type = other DNA
atggcgtttaccattggtttaacaggagggatcgcagcgggcaaatcgactgtgagtgccatgatgcgtgaactgggtctgccggtcatcgatgctgacgaggcagcacgcgccgttatgcgtccaggcgaagaagcttatcgccagattgtagctgcgttcggtccgggcattcttcgtgccgatggcgagatcgatcgccagaaactgggtgctatccgcttttcggacgaacaacaacgtaaggtgctgaatgcgattgtaggtcctgcagtcctgaagaagatgctcgctgagaaagaagctcattgtcgctcaggcgccaagacggttgtgctggatatcccgctgctgttcgaatccggattgacccattgggtcgacaaagtgctcgtggtgtacgtcgatgatgatgttcagttacgccgccttatggcacgtaacgggtttactgaagaagaagctctgaagcgcattcgttcacagtggcccagtgcggagaaagttaaacgtgcagacgctgtcatcgacaataatggcacgattgaagaaacccgccgccagctgctggccattttacaccagtgggatctgctgggtaagggtggctccggccaccatcatcaccatcac

SEQ ID NO: 930 - protein, 211 aa, synthetic construct
  REGION 1..211: note = Variant of 3'O-kinase
MAFTIGLTGGIAAGKSTVSAMMRELGLPVIDADEAARAVMRPGEEAYRQIVAAFGPGILRADGEIDRQKLGAIRFSDEQQRKVLNAIVGPAVLKKMLAEKEAHCRSGAKTVVLDIPLLFESGLTHWVDKVLVVYVDDDVQLRRLMARNGFTEEEALKRIRSQWPSAEKVKRADAVIDNNGTIEETRRQLLAILHQWDLLGKGGSGHHHHHH

SEQ ID NO: 931 - DNA, 633 bp, synthetic construct
  misc_feature 1..633: note = Variant of 3'O-kinase
  source 1..633: mol_type = other DNA
atggcgtttaccattggtttaacaggagggatcgcagcgggcaaatcgactgtgagtgccatgatgcgtgaactgggtctgccggtcatcgatgctgacgaggcagcacgcgccgttatgcgtccaggcgaagaagcttatcgccagattgtagctgcgttcggtccgggcattcttcgtgccgatggcgagatcgatcgccagaaactgggtgctatccgcttttcggacgaacaacaacgtaaggtgctgaatgcgattgtaggtcctgcagtcctgaagaagatgctcgctgagaaagaagctcatcgtcgctcaggcgccaagacggttgtgctggatatcccgctgctgttcgaatccggattgacccattgggtcgacaaagtgctcgtggtgtacgtcgatgatgatgttcagttacgccgccttatggcacgtaacgggtttactgaagaagaagctctgaagcgcattcgttcacagtggcccagtgcggagaaagttaaacgtgcagacgctgtcatcgacaataatggcacgattgaagaaacccgccgccagctgctggccattttacaccagtgggatctgctgggtaagggtggctccggccaccatcatcaccatcac

SEQ ID NO: 932 - protein, 211 aa, synthetic construct
  REGION 1..211: note = Variant of 3'O-kinase
MAFTIGLTGGIAAGKSTVSAMMRELGLPVIDADEAARAVMRPGEEAYRQIVAAFGPGILRADGEIDRQKLGAIRFSDEQQRKVLNAIVGPAVLKKMLAEKEAHRRSGAKTVVLDIPLLFESGLTHWVDKVLVVYVDDDVQLRRLMARNGFTEEEALKRIRSQWPSAEKVKRADAVIDNNGTIEETRRQLLAILHQWDLLGKGGSGHHHHHH

SEQ ID NO: 933 - DNA, 633 bp, synthetic construct
  misc_feature 1..633: note = Variant of 3'O-kinase
  source 1..633: mol_type = other DNA
atggcgtttaccattggtttaacaggagggatcgcagcgggcaaatcgactgtgagtgccatgatgcgtgaactgggtctgccggtcatcgatgctgacgaggcagcacgcgccgttatgcgtccaggcgaagaagcttatcgccagattgtagctgcgttcggtccgggcattcttcgtgccgatggcgagatcgatcgccagaaactgggtgctatccgcttttcggacgaacaacaacgtaaggtgctgaatgcgattgtaggtcctgcagtcctgaagaagatgctcgctgagaaagaagctcatatccgctcaggcgccctgacggttgtgctggatatcccgctgctgttcgaatccggattgacccattgggtcgacaaagtgctcgtggtgtacgtcgatgatgatgttcagttacgccgccttatggcacgtaacgggtttactgaagaagaagctctgaagcgcattcgttcacagtggcccagtgcggagaaagttaaacgtgcagacgctgtcatcgacaataatggcacgattgaagaaacccgccgccagctgctggccattttacaccagtgggatctgctgggtaagggtggctccggccaccatcatcaccatcac

SEQ ID NO: 934 - protein, 211 aa, synthetic construct
  REGION 1..211: note = Variant of 3'O-kinase
MAFTIGLTGGIAAGKSTVSAMMRELGLPVIDADEAARAVMRPGEEAYRQIVAAFGPGILRADGEIDRQKLGAIRFSDEQQRKVLNAIVGPAVLKKMLAEKEAHIRSGALTVVLDIPLLFESGLTHWVDKVLVVYVDDDVQLRRLMARNGFTEEEALKRIRSQWPSAEKVKRADAVIDNNGTIEETRRQLLAILHQWDLLGKGGSGHHHHHH

SEQ ID NO: 935 - DNA, 633 bp, synthetic construct
  misc_feature 1..633: note = Variant of 3'O-kinase
  source 1..633: mol_type = other DNA
atggcgtttaccattggtttaacaggagggatcgcagcgggcaaatcgactgtgagtgccatgatgcgtgaagtgggtctgccggtcatcgatgctgacgaggcagcacgcgccgttatgcgtccaggcgaagaagcttatcgccagattgtagctgcgttcggtccgggcattcttcgtgccgatggcgagatcgatcgccagaaactgggtgctatccgcttttcggacgaacaacaacgtaaggtgctgaatgcgattgtaggtcctgcagtcctgaagaagatgctcgctgagaaagaagctcatatccgctcaggcgccaagacggttgtgctggatatcccgctgctgttcgaatccggattgacccattgggtcgacaaagtgctcgtggtgtacgtcgatgatgatgttcagttacgccgccttatggcacgtaacgggtttactgaagaagaagctctgaagcgcattcgttcacagtggcccagtgcggagaaagttaaacgtgcagacgctgtcatcgacaataatggcacgattgaagaaacccgccgccagctgctggccattttacaccagtgggatctgctgggtaagggtggctccggccaccatcatcaccatcac

SEQ ID NO: 936 - protein, 211 aa, synthetic construct
  REGION 1..211: note = Variant of 3'O-kinase
MAFTIGLTGGIAAGKSTVSAMMREVGLPVIDADEAARAVMRPGEEAYRQIVAAFGPGILRADGEIDRQKLGAIRFSDEQQRKVLNAIVGPAVLKKMLAEKEAHIRSGAKTVVLDIPLLFESGLTHWVDKVLVVYVDDDVQLRRLMARNGFTEEEALKRIRSQWPSAEKVKRADAVIDNNGTIEETRRQLLAILHQWDLLGKGGSGHHHHHH

SEQ ID NO: 937 - DNA, 633 bp, synthetic construct
  misc_feature 1..633: note = Variant of 3'O-kinase
  source 1..633: mol_type = other DNA
atggcgtttaccattggtttaacaggagggatcgcagcgggcaaatcgactgtgagtgccatgatgcgtgaactgggtctgccggtcatcgatgctgacgaggcagcacgcgccgttatgcgtccaggcgaagaagcttatcgccagattgtagctgcgttcggtccgggcattcttcgtgccgatggcgagatcgatcgccagaaactgggtgctatccgcttttcggacgaacaacaacgtaaggtgctgaatgcgattgtaggtcctgcagtcctgaagaagatgctcgctgagaaagaagctcatatccgctcaggcgccaagacggttgtgctggatatcccgctgctgttcgaatccggattgacccattgggtcgacaaagtgctcgtggtgtacgtcgatgatgatgttcagttacgccgccttatggcacgtaacacttttactgaagaagaagctctgaagcgcattcgttcacagtggcccagtgcggagaaagttaaacgtgcagacgctgtcatcgacaataatggcacgattgaagaaacccgccgccagctgctggccattttacaccagtgggatctgctgggtaagggtggctccggccaccatcatcaccatcac

SEQ ID NO: 938 - protein, 211 aa, synthetic construct
  REGION 1..211: note = Variant of 3'O-kinase
MAFTIGLTGGIAAGKSTVSAMMRELGLPVIDADEAARAVMRPGEEAYRQIVAAFGPGILRADGEIDRQKLGAIRFSDEQQRKVLNAIVGPAVLKKMLAEKEAHIRSGAKTVVLDIPLLFESGLTHWVDKVLVVYVDDDVQLRRLMARNTFTEEEALKRIRSQWPSAEKVKRADAVIDNNGTIEETRRQLLAILHQWDLLGKGGSGHHHHHH

SEQ ID NO: 939 - DNA, 633 bp, synthetic construct
  misc_feature 1..633: note = Variant of 3'O-kinase
  source 1..633: mol_type = other DNA
atggcgtttaccattggtttaacaggagggatcgcagcgggcaaatcgactgtgagtgccatgatgcgtgaactgggtctgccggtcatcgatgctgacgaggcagcacgcgccgttatgcgtccaggcgaagaagcttatcgccagattgtagctgcgttcggtatgggcattcttcgtgccgatggcgagatcgatcgccagaaactgggtgctatccgcttttcggacgaacaacaacgtaaggtgctgaatgcgattgtaggtcctgcagtcctgaagaagatgctcgctgagaaagaagctcatatccgctcaggcgccaagacggttgtgctggatatcccgctgctgttcgaatccggattgacccattgggtcgacaaagtgctcgtggtgtacgtcgatgatgatgttcagttacgccgccttatggcacgtaacgggtttactgaagaagaagctctgaagcgcattcgttcacagtggcccagtgcggagaaagttaaacgtgcagacgctgtcatcgacaataatggcacgattgaagaaacccgccgccagctgctggccattttacaccagtgggatctgctgggtaagggtggctccggccaccatcatcaccatcac

SEQ ID NO: 940 - protein, 211 aa, synthetic construct
  REGION 1..211: note = Variant of 3'O-kinase
MAFTIGLTGGIAAGKSTVSAMMRELGLPVIDADEAARAVMRPGEEAYRQIVAAFGMGILRADGEIDRQKLGAIRFSDEQQRKVLNAIVGPAVLKKMLAEKEAHIRSGAKTVVLDIPLLFESGLTHWVDKVLVVYVDDDVQLRRLMARNGFTEEEALKRIRSQWPSAEKVKRADAVIDNNGTIEETRRQLLAILHQWDLLGKGGSGHHHHHH

SEQ ID NO: 941 - DNA, 633 bp, synthetic construct
  misc_feature 1..633: note = Variant of 3'O-kinase
  source 1..633: mol_type = other DNA
atggcgtttaccattggtttaacaggagggatcgcagcgggcaaatcgactgtgagtgccatgatgcgtgaactgggtctgccggtcatcgatgctgacgaggcagcacgcgccgttatgcgtccaggcgaagaagcttatcgccagattgtagctgcgttcggtccgggcattcttcgtgccgatggcgagatcgatcgccagaaactgggtgctatccgcttttcggacgaacaacaacgtaaggtgctgaatgcgattgtaggtcctgcagtcctgaagaagatgctcgctgagaaagaagctcatatccgctcaggcgccaagacggttgtgctggatatcccgctgctgttcgaatccggattgacccattgggtcgacaaagtgctcgtggtgtacgtcgatgatgatgttcagttacgccgccttatggcacgtaacgggtttactgaagaagaagctctgaagcgcattcgttcacagtggcccagtgcgattaaagttaaacgtgcagacgctgtcatcgacaataatggcacgattgaagaaacccgccgccagctgctggccattttacaccagtgggatctgctgggtaagggtggctccggccaccatcatcaccatcac

SEQ ID NO: 942 - protein, 211 aa, synthetic construct
  REGION 1..211: note = Variant of 3'O-kinase
MAFTIGLTGGIAAGKSTVSAMMRELGLPVIDADEAARAVMRPGEEAYRQIVAAFGPGILRADGEIDRQKLGAIRFSDEQQRKVLNAIVGPAVLKKMLAEKEAHIRSGAKTVVLDIPLLFESGLTHWVDKVLVVYVDDDVQLRRLMARNGFTEEEALKRIRSQWPSAIKVKRADAVIDNNGTIEETRRQLLAILHQWDLLGKGGSGHHHHHH

SEQ ID NO: 943 - DNA, 633 bp, synthetic construct
  misc_feature 1..633: note = Variant of 3'O-kinase
  source 1..633: mol_type = other DNA
atggcgtttaccattggtttaacaggagggatcgcagcgggcaaatcgactgtgagtgccatgatgcgtgaactgggtctgccggtcatcgatgctgacgaggcagcacgcgccgttatgcgtccaggcgaagaagcttatcgccaggttgtagctgcgttcggtccgggcattcttcgtgccgatggcgagatcgatcgccagaaactgggtgctatccgcttttcggacgaacaacaacgtaaggtgctgaatgcgattgtaggtcctgcagtcctgaagaagatgctcgctgagaaagaagctcatatccgctcaggcgccaagacggttgtgctggatatcccgctgctgttcgaatccggattgacccattgggtcgacaaagtgctcgtggtgtacgtcgatgatgatgttcagttacgccgccttatggcacgtaacgggtttactgaagaagaagctctgaagcgcattcgttcacagtggcccagtgcggagaaagttaaacgtgcagacgctgtcatcgacaataatggcacgattgaagaaacccgccgccagctgctggccattttacaccagtgggatctgctgggtaagggtggctccggccaccatcatcaccatcac

SEQ ID NO: 944 - protein, 211 aa, synthetic construct
  REGION 1..211: note = Variant of 3'O-kinase
MAFTIGLTGGIAAGKSTVSAMMRELGLPVIDADEAARAVMRPGEEAYRQVVAAFGPGILRADGEIDRQKLGAIRFSDEQQRKVLNAIVGPAVLKKMLAEKEAHIRSGAKTVVLDIPLLFESGLTHWVDKVLVVYVDDDVQLRRLMARNGFTEEEALKRIRSQWPSAEKVKRADAVIDNNGTIEETRRQLLAILHQWDLLGKGGSGHHHHHH

SEQ ID NO: 945 - DNA, 633 bp, synthetic construct
  misc_feature 1..633: note = Variant of 3'O-kinase
  source 1..633: mol_type = other DNA
atggcgtttaccattggtttaacaggagggatcgcagcgggcaaatcgactgtgagtgccatgatgcgtgaactgggtctgccggtcatcgatgctgacgaggcagcacgcgccgttatgcgtccaggcgaagaagcttatcgccagattgtagctgcgttcggtccgggcattcttcgtgccgatggcgagatcgatcgccagaaactgggtgctatccgcttttcggacgaacaacaacgtaaggtgctgaatgcgattgtaggtcctgcagtcctgaagaagatgctcgctgagaaagaagctcatatccgctcaggcgccaagacggttgtgctggatatcccgctgctgttcgaatccggattgacccattgggtcgacaaagtgctcgtggtgtacgtcgatgatgatgttcagttacgccgccttatggcacgtaacgggtttactgaagaagaagctctgaagcgcattcgttcacagtggcccagtgcggagaaagttaaacgtgcagacgctgtcatcgacaataatggcacgattgaagaaacccgccgccagctgctgacgattttacaccagtgggatctgctgggtaagggtggctccggccaccatcatcaccatcac

SEQ ID NO: 946 - protein, 211 aa, synthetic construct
  REGION 1..211: note = Variant of 3'O-kinase
MAFTIGLTGGIAAGKSTVSAMMRELGLPVIDADEAARAVMRPGEEAYRQIVAAFGPGILRADGEIDRQKLGAIRFSDEQQRKVLNAIVGPAVLKKMLAEKEAHIRSGAKTVVLDIPLLFESGLTHWVDKVLVVYVDDDVQLRRLMARNGFTEEEALKRIRSQWPSAEKVKRADAVIDNNGTIEETRRQLLTILHQWDLLGKGGSGHHHHHH

SEQ ID NO: 947 - DNA, 633 bp, synthetic construct
  misc_feature 1..633: note = Variant of 3'O-kinase
  source 1..633: mol_type = other DNA
atggcgtttaccattggtttaacaggagggatcgcagcgggcaaatcgactgtgagtgccatgatgcgtgaactgggtctgccggtcatcgatgctgacgaggcagcacgcgccgttatgcgtccaggcgaagaagcttatcgccagattgtagctgcgttcggtccgggcattcttcgtgccgatggcgagatcgatcgccagaaactgggtgctatccgcttttcggacgaacaacaacgtaaggtgctgaatgcgattgtaggtcctgcagtcctgaagaagatgctcgctgagaaagaagctcatatccgctcaggcgccaagacggttgtgctggatatcccgctgctgttcgaatccggattgacccattgggtcgacaaagtgctcgtggtgtacgtcgatgatgatgttcagttacgccgccttatggcacgtaacgggtttactgaagaagaagctctgaagcgcattcgttcacagtggcccagtgcggagaaagttaaacgtgcagacgctgtcatcgacaataatggcacgattgaagaaacccgccgccagctgctggccattttacaccagtgggatctgctgggtaagggtgcgtccggccaccatcatcaccatcac

SEQ ID NO: 948 - protein, 211 aa, synthetic construct
  REGION 1..211: note = Variant of 3'O-kinase
MAFTIGLTGGIAAGKSTVSAMMRELGLPVIDADEAARAVMRPGEEAYRQIVAAFGPGILRADGEIDRQKLGAIRFSDEQQRKVLNAIVGPAVLKKMLAEKEAHIRSGAKTVVLDIPLLFESGLTHWVDKVLVVYVDDDVQLRRLMARNGFTEEEALKRIRSQWPSAEKVKRADAVIDNNGTIEETRRQLLAILHQWDLLGKGASGHHHHHH

SEQ ID NO: 949 - DNA, 633 bp, synthetic construct
  misc_feature 1..633: note = Variant of 3'O-kinase
  source 1..633: mol_type = other DNA
atggcgtttaccattggtttaacaggagggatcgcagcgggcaaatcgactgtgagtgccatgatgcgtgaactgggtctgccggtcatcgatgctgacgaggcagcacgcgccgttatgcgtccaggcgaagaagcttatcgccagattgtagctgcgttcggtccgggcattcttcgtgccgatggcgagatcgatcgccagaaactgggtgctatccgcttttcggacgaacaacaacgtaaggtgctgaatgcgattgtaggtcctgcagtcctgaagaagatgctcgctgagaaagaagctcatatccgctcaggcgccaagacggttgtgctggatatcccgctgctgttcgaatccggattgacccattgggtcgacaaagtgctcgtggtgtacgtcgatgatgatgttcagttacgccgccttatggcacgtaacgggtttactgaagaagaagctctgaagcgcattcgttcacagtggcccagtgcggagaaagttaaacgtgcagacgctgtcatcgacaataatggcacgattgaagaaacccgccgccagctgctggccattttagagcagtgggatctgctgggtaagggtggctccggccaccatcatcaccatcac

SEQ ID NO: 950 - protein, 211 aa, synthetic construct
  REGION 1..211: note = Variant of 3'O-kinase
MAFTIGLTGGIAAGKSTVSAMMRELGLPVIDADEAARAVMRPGEEAYRQIVAAFGPGILRADGEIDRQKLGAIRFSDEQQRKVLNAIVGPAVLKKMLAEKEAHIRSGAKTVVLDIPLLFESGLTHWVDKVLVVYVDDDVQLRRLMARNGFTEEEALKRIRSQWPSAEKVKRADAVIDNNGTIEETRRQLLAILEQWDLLGKGGSGHHHHHH

SEQ ID NO: 951 - DNA, 633 bp, synthetic construct
  misc_feature 1..633: note = Variant of 3'O-kinase
  source 1..633: mol_type = other DNA
atggcgtttaccattggtttaacaggagggatcgcagcgggcaaatcgactgtgagtgccatgatgcgtgaactgggtctgccggtcatcgatgctgacgaggcagcacgcgccgttatgcgtccaggcggtgaagcttatcgccagattgtagctgcgttcggtccgggcattcttcgtgccgatggcgagatcgatcgccagaaactgggtgctatccgcttttcggacgaacaacaacgtaaggtgctgaatgcgattgtaggtcctgcagtcctgaagaagatgctcgctgagaaagaagctcatatccgctcaggcgccaagacggttgtgctggatatcccgctgctgttcgaatccggattgacccattgggtcgacaaagtgctcgtggtgtacgtcgatgatgatgttcagttacgccgccttatggcacgtaacgggtttactgaagaagaagctctgaagcgcattcgttcacagtggcccagtgcggagaaagttaaacgtgcagacgctgtcatcgacaataatggcacgattgaagaaacccgccgccagctgctggccattttacaccagtgggatctgctgggtaagggtggctccggccaccatcatcaccatcac

SEQ ID NO: 952 - protein, 211 aa, synthetic construct
  REGION 1..211: note = Variant of 3'O-kinase
MAFTIGLTGGIAAGKSTVSAMMRELGLPVIDADEAARAVMRPGGEAYRQIVAAFGPGILRADGEIDRQKLGAIRFSDEQQRKVLNAIVGPAVLKKMLAEKEAHIRSGAKTVVLDIPLLFESGLTHWVDKVLVVYVDDDVQLRRLMARNGFTEEEALKRIRSQWPSAEKVKRADAVIDNNGTIEETRRQLLAILHQWDLLGKGGSGHHHHHH

SEQ ID NO: 953 - DNA, 633 bp, synthetic construct
  misc_feature 1..633: note = Variant of 3'O-kinase
  source 1..633: mol_type = other DNA
atggcgtttaccattggtttaacaggagggatcgcagcgggcaaatcgactgtgagtgccatgatgcgtgaactgggtctgccggtcatcgatgctgacgaggcagcacgcgccgttatgcgtccaggcgaagaagcttatcgccagattgtagctgcgttcggtccgggcattcttcgtgccgatggcgagatcgatcgccagaaactgggtgctatccgcttttcggacgaacaacaacgtaaggtgctgaatgcgattgtaggtcctgcagtcctgaagaagatgctcgctgagattgaagctcatatccgctcaggcgccaagacggttgtgctggatatcccgctgctgttcgaatccggattgacccattgggtcgacaaagtgctcgtggtgtacgtcgatgatgatgttcagttacgccgccttatggcacgtaacgggtttactgaagaagaagctctgaagcgcattcgttcacagtggcccagtgcggagaaagttaaacgtgcagacgctgtcatcgacaataatggcacgattgaagaaacccgccgccagctgctggccattttacaccagtgggatctgctgggtaagggtggctccggccaccatcatcaccatcac

SEQ ID NO: 954 - protein, 211 aa, synthetic construct
  REGION 1..211: note = Variant of 3'O-kinase
MAFTIGLTGGIAAGKSTVSAMMRELGLPVIDADEAARAVMRPGEEAYRQIVAAFGPGILRADGEIDRQKLGAIRFSDEQQRKVLNAIVGPAVLKKMLAEIEAHIRSGAKTVVLDIPLLFESGLTHWVDKVLVVYVDDDVQLRRLMARNGFTEEEALKRIRSQWPSAEKVKRADAVIDNNGTIEETRRQLLAILHQWDLLGKGGSGHHHHHH

SEQ ID NO: 955 - DNA, 633 bp, synthetic construct
  misc_feature 1..633: note = Variant of 3'O-kinase
  source 1..633: mol_type = other DNA
atggcgtttaccattggtttaacaggagggatcgcagcgggcaaatcgactgtgagtgccatgatgcgtgaactgggtctgccggtcatcgatgctgacgaggcagcacgcgccgttatgcgtccaggcgaagaagcttatcgccagattgtagctgcgttcggtccgggcattcttcgtgccgatggcgagatcgatcgccagaaactgggtgctatccgcttttcggacgaacaacaacgtaaggtgctgaatgcgattgtaggtcctgcagtcctgaagaagatgctcgctgagaaagaagctcatatccgctcaggcgccaagacggttgtgctggatatcccgctgctgttcgaatccggattgacccattggtatgacaaagtgctcgtggtgtacgtcgatgatgatgttcagttacgccgccttatggcacgtaacgggtttactgaagaagaagctctgaagcgcattcgttcacagtggcccagtgcggagaaagttaaacgtgcagacgctgtcatcgacaataatggcacgattgaagaaacccgccgccagctgctggccattttacaccagtgggatctgctgggtaagggtggctccggccaccatcatcaccatcac

SEQ ID NO: 956 - protein, 211 aa, synthetic construct
  REGION 1..211: note = Variant of 3'O-kinase
MAFTIGLTGGIAAGKSTVSAMMRELGLPVIDADEAARAVMRPGEEAYRQIVAAFGPGILRADGEIDRQKLGAIRFSDEQQRKVLNAIVGPAVLKKMLAEKEAHIRSGAKTVVLDIPLLFESGLTHWYDKVLVVYVDDDVQLRRLMARNGFTEEEALKRIRSQWPSAEKVKRADAVIDNNGTIEETRRQLLAILHQWDLLGKGGSGHHHHHH

SEQ ID NO: 957 - DNA, 633 bp, synthetic construct
  misc_feature 1..633: note = Variant of 3'O-kinase
  source 1..633: mol_type = other DNA
atggcgtttaccattggtttaacaggagggatcgcagcgggcaaatcgactgtgagtgccatgatgcgtgaactgggtctgccggtcatcgatgctgacgaggcagcacgcgccgttatgcgtccaggcgaagaagcttatcgccagattgtagctgcgttcggtccgggcattcttcgtgccgatggcgagatcgatcgccagaaactgggtgctatccgcttttcggacgaacaacaacgtaaggtgctgaatgcgattgtaggtcctgcagtcctgaagaagatgctcgctgagaaagaagctcatatccgctcaggcgccaagacggttgtgctggatatcccgctgctgttcgaatccggattgacccattgggtcgacaaagtgctcgtggtgtacgtcgatgatgatgttcagttacgccgccttatggcacgtaacgggtttactgaagaagaagctctgaagcgcattcgttcacagtggcccagtgcggagaaagttattcgtgcagacgctgtcatcgacaataatggcacgattgaagaaacccgccgccagctgctggccattttacaccagtgggatctgctgggtaagggtggctccggccaccatcatcaccatcac

SEQ ID NO: 958 - protein, 211 aa, synthetic construct
  REGION 1..211: note = Variant of 3'O-kinase
MAFTIGLTGGIAAGKSTVSAMMRELGLPVIDADEAARAVMRPGEEAYRQIVAAFGPGILRADGEIDRQKLGAIRFSDEQQRKVLNAIVGPAVLKKMLAEKEAHIRSGAKTVVLDIPLLFESGLTHWVDKVLVVYVDDDVQLRRLMARNGFTEEEALKRIRSQWPSAEKVIRADAVIDNNGTIEETRRQLLAILHQWDLLGKGGSGHHHHHH

SEQ ID NO: 959 - DNA, 633 bp, synthetic construct
  misc_feature 1..633: note = Variant of 3'O-kinase
  source 1..633: mol_type = other DNA
atggcgtttacctatggtttaacaggagggatcgcagcgggcaaatcgactgtgagtgccatgatgcgtgaactgggtctgccggtcatcgatgctgacgaggcagcacgcgccgttatgcgtccaggcgaagaagcttatcgccagattgtagctgcgttcggtccgggcattcttcgtgccgatggcgagatcgatcgccagaaactgggtgctatccgcttttcggacgaacaacaacgtaaggtgctgaatgcgattgtaggtcctgcagtcctgaagaagatgctcgctgagaaagaagctcatatccgctcaggcgccaagacggttgtgctggatatcccgctgctgttcgaatccggattgacccattgggtcgacaaagtgctcgtggtgtacgtcgatgatgatgttcagttacgccgccttatggcacgtaacgggtttactgaagaagaagctctgaagcgcattcgttcacagtggcccagtgcggagaaagttaaacgtgcagacgctgtcatcgacaataatggcacgattgaagaaacccgccgccagctgctggccattttacaccagtgggatctgctgggtaagggtggctccggccaccatcatcaccatcac

SEQ ID NO: 960 - protein, 211 aa, synthetic construct
  REGION 1..211: note = Variant of 3'O-kinase
MAFTYGLTGGIAAGKSTVSAMMRELGLPVIDADEAARAVMRPGEEAYRQIVAAFGPGILRADGEIDRQKLGAIRFSDEQQRKVLNAIVGPAVLKKMLAEKEAHIRSGAKTVVLDIPLLFESGLTHWVDKVLVVYVDDDVQLRRLMARNGFTEEEALKRIRSQWPSAEKVKRADAVIDNNGTIEETRRQLLAILHQWDLLGKGGSGHHHHHH

SEQ ID NO: 961 - DNA, 633 bp, synthetic construct
  misc_feature 1..633: note = Variant of 3'O-kinase
  source 1..633: mol_type = other DNA
atggcgtttaccattggtttaacaggagggatcgcagcgggcaaatcgactgtgagtgccatgatgcgtgaactgggtctgccggtcatcgatgctgacgaggcagcacgcgccgttatgcgtccaggcgaagaagcttatcgccagattgtagctgcgttcggtccgggcattcttcgtgccgatggcgagatcgatcgccagaaactgggtgctatccgcttttcggacgaacaacaacgtaaggtgctgaatgcgattgtaggtcctgcagtcctgaagaagatgctcgctgagaaagaagctcatatccgctcaggcgccaagacggttgtgctggatatcccgctgctgttcgaatccggattgacccattgggtcgacaaagtgctcgtggtgtacgtcgatgatgatgttcagttacgccgccttatggcacgtaacttttttactgaagaagaagctctgaagcgcattcgttcacagtggcccagtgcggagaaagttaaacgtgcagacgctgtcatcgacaataatggcacgattgaagaaacccgccgccagctgctggccattttacaccagtgggatctgctgggtaagggtggctccggccaccatcatcaccatcac

SEQ ID NO: 962 - protein, 211 aa, synthetic construct
  REGION 1..211: note = Variant of 3'O-kinase
MAFTIGLTGGIAAGKSTVSAMMRELGLPVIDADEAARAVMRPGEEAYRQIVAAFGPGILRADGEIDRQKLGAIRFSDEQQRKVLNAIVGPAVLKKMLAEKEAHIRSGAKTVVLDIPLLFESGLTHWVDKVLVVYVDDDVQLRRLMARNFFTEEEALKRIRSQWPSAEKVKRADAVIDNNGTIEETRRQLLAILHQWDLLGKGGSGHHHHHH

SEQ ID NO: 963 - DNA, 633 bp, synthetic construct
  misc_feature 1..633: note = Variant of 3'O-kinase
  source 1..633: mol_type = other DNA
atggcgtttaccattggtttaacaggagggatcgcagcgggcaaatcgactgtgagtgccatgatgcgtgaactgggtctgccggtcatcgatgctgacgaggcagcacgcgccgttatgcgtccaggcgaagaagcttatcgccagattactgctgcgttcggtccgggcattcttcgtgccgatggcgagatcgatcgccagaaactgggtgctatccgcttttcggacgaacaacaacgtaaggtgctgaatgcgattgtaggtcctgcagtcctgaagaagatgctcgctgagaaagaagctcatatccgctcaggcgccaagacggttgtgctggatatcccgctgctgttcgaatccggattgacccattgggtcgacaaagtgctcgtggtgtacgtcgatgatgatgttcagttacgccgccttatggcacgtaacgggtttactgaagaagaagctctgaagcgcattcgttcacagtggcccagtgcggagaaagttaaacgtgcagacgctgtcatcgacaataatggcacgattgaagaaacccgccgccagctgctggccattttacaccagtgggatctgctgggtaagggtggctccggccaccatcatcaccatcac

SEQ ID NO: 964 - protein, 211 aa, synthetic construct
  REGION 1..211: note = Variant of 3'O-kinase
MAFTIGLTGGIAAGKSTVSAMMRELGLPVIDADEAARAVMRPGEEAYRQITAAFGPGILRADGEIDRQKLGAIRFSDEQQRKVLNAIVGPAVLKKMLAEKEAHIRSGAKTVVLDIPLLFESGLTHWVDKVLVVYVDDDVQLRRLMARNGFTEEEALKRIRSQWPSAEKVKRADAVIDNNGTIEETRRQLLAILHQWDLLGKGGSGHHHHHH

SEQ ID NO: 965 - DNA, 633 bp, synthetic construct
  misc_feature 1..633: note = Variant of 3'O-kinase
  source 1..633: mol_type = other DNA
atggcgtttaccattggtttaacaggagggatcgcagcgggcaaatcgactgtgagtgccatgatgcgtgaactgggtctgccggtcatcgatgctgacgaggcagcacgcgccgttatgcgtccaggcgaagaagcttatcgccagattgtagctgcgttcggtccgtggattcttcgtgccgatggcgagatcgatcgccagaaactgggtgctatccgcttttcggacgaacaacaacgtaaggtgctgaatgcgattgtaggtcctgcagtcctgaagaagatgctcgctgagaaagaagctcatatccgctcaggcgccaagacggttgtgctggatatcccgctgctgttcgaatccggattgacccattgggtcgacaaagtgctcgtggtgtacgtcgatgatgatgttcagttacgccgccttatggcacgtaacgggtttactgaagaagaagctctgaagcgcattcgttcacagtggcccagtgcggagaaagttaaacgtgcagacgctgtcatcgacaataatggcacgattgaagaaacccgccgccagctgctggccattttacaccagtgggatctgctgggtaagggtggctccggccaccatcatcaccatcac

SEQ ID NO: 966 - protein, 211 aa, synthetic construct
  REGION 1..211: note = Variant of 3'O-kinase
MAFTIGLTGGIAAGKSTVSAMMRELGLPVIDADEAARAVMRPGEEAYRQIVAAFGPWILRADGEIDRQKLGAIRFSDEQQRKVLNAIVGPAVLKKMLAEKEAHIRSGAKTVVLDIPLLFESGLTHWVDKVLVVYVDDDVQLRRLMARNGFTEEEALKRIRSQWPSAEKVKRADAVIDNNGTIEETRRQLLAILHQWDLLGKGGSGHHHHHH

SEQ ID NO: 967 - DNA, 633 bp, synthetic construct
  misc_feature 1..633: note = Variant of 3'O-kinase
  source 1..633: mol_type = other DNA
atggcgtttaccattggtttaacaggagggatcgcagcgggcaaatcgactgtgagtgccatgatgcgtgaactgggtctgccggtcatcgatgctgacgaggcagcacgcgccgttatgcgtccaggcgaagaagcttatcgccagattgtagctgcgttcggtccgggcattcttcgtgccgatggcgagatcgatcgccagaaactgggtgctatccgcttttcggacgaacaacaacgtaaggtgctgaatgcgattgtaggtcctgcagtcctgaagaagatgctcgctgagaaagaagctcattatcgctcaggcgccaagacggttgtgctggatatcccgctgctgttcgaatccggattgacccattgggtcgacaaagtgctcgtggtgtacgtcgatgatgatgttcagttacgccgccttatggcacgtaacgggtttactgaagaagaagctctgaagcgcattcgttcacagtggcccagtgcggagaaagttaaacgtgcagacgctgtcatcgacaataatggcacgattgaagaaacccgccgccagctgctggccattttacaccagtgggatctgctgggtaagggtggctccggccaccatcatcaccatcac

SEQ ID NO: 968 - protein, 211 aa, synthetic construct
  REGION 1..211: note = Variant of 3'O-kinase
MAFTIGLTGGIAAGKSTVSAMMRELGLPVIDADEAARAVMRPGEEAYRQIVAAFGPGILRADGEIDRQKLGAIRFSDEQQRKVLNAIVGPAVLKKMLAEKEAHYRSGAKTVVLDIPLLFESGLTHWVDKVLVVYVDDDVQLRRLMARNGFTEEEALKRIRSQWPSAEKVKRADAVIDNNGTIEETRRQLLAILHQWDLLGKGGSGHHHHHH

SEQ ID NO: 969 - DNA, 633 bp, synthetic construct
  misc_feature 1..633: note = Variant of 3'O-kinase
  source 1..633: mol_type = other DNA
atggcgtttaccattggtttaacaggagggatcgcagcgggcaaatcgactgtgagtgccatgatgcgtgaactgggtctgccggtcatcgatgctgacgaggcagcacgcgccgttatgcgtccaggcgaagaagctggtcgccagattgtagctgcgttcggtccgggcattcttcgtgccgatggcgagatcgatcgccagaaactgggtgctatccgcttttcggacgaacaacaacgtaaggtgctgaatgcgattgtaggtcctgcagtcctgaagaagatgctcgctgagaaagaagctcatatccgctcaggcgccaagacggttgtgctggatatcccgctgctgttcgaatccggattgacccattgggtcgacaaagtgctcgtggtgtacgtcgatgatgatgttcagttacgccgccttatggcacgtaacgggtttactgaagaagaagctctgaagcgcattcgttcacagtggcccagtgcggagaaagttaaacgtgcagacgctgtcatcgacaataatggcacgattgaagaaacccgccgccagctgctggccattttacaccagtgggatctgctgggtaagggtggctccggccaccatcatcaccatcac

SEQ ID NO: 970 - protein, 211 aa, synthetic construct
  REGION 1..211: note = Variant of 3'O-kinase
MAFTIGLTGGIAAGKSTVSAMMRELGLPVIDADEAARAVMRPGEEAGRQIVAAFGPGILRADGEIDRQKLGAIRFSDEQQRKVLNAIVGPAVLKKMLAEKEAHIRSGAKTVVLDIPLLFESGLTHWVDKVLVVYVDDDVQLRRLMARNGFTEEEALKRIRSQWPSAEKVKRADAVIDNNGTIEETRRQLLAILHQWDLLGKGGSGHHHHHH

SEQ ID NO: 971 - DNA, 633 bp, synthetic construct
  misc_feature 1..633: note = Variant of 3'O-kinase
  source 1..633: mol_type = other DNA
atggcgtttaccattggtttaacaggagggatcgcagcgggcaaatcgactgtgagtgccatgatgcgtgaactgggtctgccggtcatcgatgctgacgaggcagcacgcgccgttatgcgtccaggcgaagaagcttatcgccagattgtagctgcgttcggtccgggcattcttcgtgccgatggcgagatcgatcgccagaaactgggtgctatccgcttttcggacgaacaacaacgtaaggtgctgaatgcgattgtaggtcctgcagtcctgaagaagatgctcgctgagaaaattgctcatatccgctcaggcgccaagacggttgtgctggatatcccgctgctgttcgaatccggattgacccattgggtcgacaaagtgctcgtggtgtacgtcgatgatgatgttcagttacgccgccttatggcacgtaacgggtttactgaagaagaagctctgaagcgcattcgttcacagtggcccagtgcggagaaagttaaacgtgcagacgctgtcatcgacaataatggcacgattgaagaaacccgccgccagctgctggccattttacaccagtgggatctgctgggtaagggtggctccggccaccatcatcaccatcac

SEQ ID NO: 972 - protein, 211 aa, synthetic construct
  REGION 1..211: note = Variant of 3'O-kinase
MAFTIGLTGGIAAGKSTVSAMMRELGLPVIDADEAARAVMRPGEEAYRQIVAAFGPGILRADGEIDRQKLGAIRFSDEQQRKVLNAIVGPAVLKKMLAEKIAHIRSGAKTVVLDIPLLFESGLTHWVDKVLVVYVDDDVQLRRLMARNGFTEEEALKRIRSQWPSAEKVKRADAVIDNNGTIEETRRQLLAILHQWDLLGKGGSGHHHHHH

SEQ ID NO: 973 - DNA, 633 bp, synthetic construct
  misc_feature 1..633: note = Variant of 3'O-kinase
  source 1..633: mol_type = other DNA
atggcgtttaccattggtttaacaggagggatcgcagcgggcaaatcgactgtgagtgccatgatgcgtgaactgggtctgccggtcatcgatgctgacgaggcagcacgcgccgttatgcgtccaggcgaagaagcttatcgccagattgtaattgcgttcggtccgggcattcttcgtgccgatggcgagatcgatcgccagaaactgggtgctatccgcttttcggacgaacaacaacgtaaggtgctgaatgcgattgtaggtcctgcagtcctgaagaagatgctcgctgagaaagaagctcatatccgctcaggcgccaagacggttgtgctggatatcccgctgctgttcgaatccggattgacccattgggtcgacaaagtgctcgtggtgtacgtcgatgatgatgttcagttacgccgccttatggcacgtaacgggtttactgaagaagaagctctgaagcgcattcgttcacagtggcccagtgcggagaaagttaaacgtgcagacgctgtcatcgacaataatggcacgattgaagaaacccgccgccagctgctggccattttacaccagtgggatctgctgggtaagggtggctccggccaccatcatcaccatcac

SEQ ID NO: 974 - protein, 211 aa, synthetic construct
  REGION 1..211: note = Variant of 3'O-kinase
MAFTIGLTGGIAAGKSTVSAMMRELGLPVIDADEAARAVMRPGEEAYRQIVIAFGPGILRADGEIDRQKLGAIRFSDEQQRKVLNAIVGPAVLKKMLAEKEAHIRSGAKTVVLDIPLLFESGLTHWVDKVLVVYVDDDVQLRRLMARNGFTEEEALKRIRSQWPSAEKVKRADAVIDNNGTIEETRRQLLAILHQWDLLGKGGSGHHHHHH

SEQ ID NO: 975 - DNA, 633 bp, synthetic construct
  misc_feature 1..633: note = Variant of 3'O-kinase
  source 1..633: mol_type = other DNA
atggcgtttaccattggtttaacaggagggatcgcagcgggcaaatcgactgtgagtgccatgatgcgtgaactgggtctgccggtcatcgatgctgacgaggcagcacgcgccgttatgcgtccaggcgaagaagcttatcgccagattgtagctgcgttcggtccgggcattcttcgtgccgatacggagatcgatcgccagaaactgggtgctatccgcttttcggacgaacaacaacgtaaggtgctgaatgcgattgtaggtcctgcagtcctgaagaagatgctcgctgagaaagaagctcatatccgctcaggcgccaagacggttgtgctggatatcccgctgctgttcgaatccggattgacccattgggtcgacaaagtgctcgtggtgtacgtcgatgatgatgttcagttacgccgccttatggcacgtaacgggtttactgaagaagaagctctgaagcgcattcgttcacagtggcccagtgcggagaaagttaaacgtgcagacgctgtcatcgacaataatggcacgattgaagaaacccgccgccagctgctggccattttacaccagtgggatctgctgggtaagggtggctccggccaccatcatcaccatcac

SEQ ID NO: 976 - protein, 211 aa, synthetic construct
  REGION 1..211: note = Variant of 3'O-kinase
MAFTIGLTGGIAAGKSTVSAMMRELGLPVIDADEAARAVMRPGEEAYRQIVAAFGPGILRADTEIDRQKLGAIRFSDEQQRKVLNAIVGPAVLKKMLAEKEAHIRSGAKTVVLDIPLLFESGLTHWVDKVLVVYVDDDVQLRRLMARNGFTEEEALKRIRSQWPSAEKVKRADAVIDNNGTIEETRRQLLAILHQWDLLGKGGSGHHHHHH

SEQ ID NO: 977 - DNA, 633 bp, synthetic construct
  misc_feature 1..633: note = Variant of 3'O-kinase
  source 1..633: mol_type = other DNA
atggcgtttaccattggtttaacaggagggatcgcagcgggcaaatcgactgtgagtgccatgatgcgtgaactgggtctgccggtcatcgatgctgacgaggcagcacgcgccgttatgcgtccaggcgaagaagcttatcgccagattgtagctgcgttcggtccgggcattctttgtgccgatggcgagatcgatcgccagaaactgggtgctatccgcttttcggacgaacaacaacgtaaggtgctgaatgcgattgtaggtcctgcagtcctgaagaagatgctcgctgagaaagaagctcatatccgctcaggcgccaagacggttgtgctggatatcccgctgctgttcgaatccggattgacccattgggtcgacaaagtgctcgtggtgtacgtcgatgatgatgttcagttacgccgccttatggcacgtaacgggtttactgaagaagaagctctgaagcgcattcgttcacagtggcccagtgcggagaaagttaaacgtgcagacgctgtcatcgacaataatggcacgattgaagaaacccgccgccagctgctggccattttacaccagtgggatctgctgggtaagggtggctccggccaccatcatcaccatcac

SEQ ID NO: 978 - protein, 211 aa, synthetic construct
  REGION 1..211: note = Variant of 3'O-kinase
MAFTIGLTGGIAAGKSTVSAMMRELGLPVIDADEAARAVMRPGEEAYRQIVAAFGPGILCADGEIDRQKLGAIRFSDEQQRKVLNAIVGPAVLKKMLAEKEAHIRSGAKTVVLDIPLLFESGLTHWVDKVLVVYVDDDVQLRRLMARNGFTEEEALKRIRSQWPSAEKVKRADAVIDNNGTIEETRRQLLAILHQWDLLGKGGSGHHHHHH

SEQ ID NO: 979 - DNA, 633 bp, synthetic construct
  misc_feature 1..633: note = Variant of 3'O-kinase
  source 1..633: mol_type = other DNA
atggcgtttaccattggtttaacaggagggatcgcagcgggcaaatcgactgtgagtgccatgatgcgtgaactgggtctgccggtcatcgatgctgacgaggcagcacgcgccgttatgcgtccaggcgaagaagcttatcgccagattgtagctgcgttcggtccgggcattcttcgtgccgatggcgagatcgatcgccagaaactgggtgctatccgcttttcggacgaacaacaacgtaaggtgctgaatgcgattgtaggtcctgcagtcctgaagaagatgctcgctgagaaagaagctcatatccgctcaggcgccaagacggttgtgctggatatcccgctgctgttcgaatccggattgacccatccggtcgacaaagtgctcgtggtgtacgtcgatgatgatgttcagttacgccgccttatggcacgtaacgggtttactgaagaagaagctctgaagcgcattcgttcacagtggcccagtgcggagaaagttaaacgtgcagacgctgtcatcgacaataatggcacgattgaagaaacccgccgccagctgctggccattttacaccagtgggatctgctgggtaagggtggctccggccaccatcatcaccatcac

SEQ ID NO: 980 - protein, 211 aa, synthetic construct
  REGION 1..211: note = Variant of 3'O-kinase
MAFTIGLTGGIAAGKSTVSAMMRELGLPVIDADEAARAVMRPGEEAYRQIVAAFGPGILRADGEIDRQKLGAIRFSDEQQRKVLNAIVGPAVLKKMLAEKEAHIRSGAKTVVLDIPLLFESGLTHPVDKVLVVYVDDDVQLRRLMARNGFTEEEALKRIRSQWPSAEKVKRADAVIDNNGTIEETRRQLLAILHQWDLLGKGGSGHHHHHH

SEQ ID NO: 981 - DNA, 633 bp, synthetic construct
  misc_feature 1..633: note = Variant of 3'O-kinase
  source 1..633: mol_type = other DNA
atggcgtttaccattggtttaacaggagggatcgcagcgggcaaatcgactgtgagtgccatgatgcgtgaactgggtctgccggtcatcgatgctgacgaggcagcacgcgccgttatgcgtccaggcgaagaagcttatcgccagattgtagctgcgttcggtccgggcattcttcgtgccgatggcgagatcgatcgccagaaactgggtgctatccgcttttcggacgaacaacaacgtaaggtgctgaatgcgattgtaggtcctgcagtcctgaagaagatgctcgctgagaaagaagctcatgcgcgctcaggcgccaagacggttgtgctggatatcccgctgctgttcgaatccggattgacccattgggtcgacaaagtgctcgtggtgtacgtcgatgatgatgttcagttacgccgccttatggcacgtaacgggtttactgaagaagaagctctgaagcgcattcgttcacagtggcccagtgcggagaaagttaaacgtgcagacgctgtcatcgacaataatggcacgattgaagaaacccgccgccagctgctggccattttacaccagtgggatctgctgggtaagggtggctccggccaccatcatcaccatcac

SEQ ID NO: 982 - protein, 211 aa, synthetic construct
  REGION 1..211: note = Variant of 3'O-kinase
MAFTIGLTGGIAAGKSTVSAMMRELGLPVIDADEAARAVMRPGEEAYRQIVAAFGPGILRADGEIDRQKLGAIRFSDEQQRKVLNAIVGPAVLKKMLAEKEAHARSGAKTVVLDIPLLFESGLTHWVDKVLVVYVDDDVQLRRLMARNGFTEEEALKRIRSQWPSAEKVKRADAVIDNNGTIEETRRQLLAILHQWDLLGKGGSGHHHHHH

SEQ ID NO: 983 - DNA, 633 bp, synthetic construct
  misc_feature 1..633: note = Variant of 3'O-kinase
  source 1..633: mol_type = other DNA
atggcgtttaccattggtttaacaggagggatcgcagcgggcaaatcgactgtgagtgccatgatgcgtgaactgggtctgccggtcatcgatgctgacgaggcagcacgcgccgttatgcgtccaggcgaagaagcttatcgccagattgtagctgcgttcggtccgggcattcttcgtgccgatggcgagatcgatcgccagaaactgggtgctatccgcttttcggacgaacaacaacgtaaggtgctgaatgcgattgtaggtcctgcagtcctgaagaagatgctcgctgagaaagaagctcatatccgctcaggcgccaagacggttgtgctggatatcccgctgctgttcgaatccggattgacccattgggtcgacaaagtgctcgtggtgtacgtcgatgatgatgttcagttacgccgccttatggcacgtaacgggtttactgaagaagaagctctgaagcgcattcgttcacagtggcccagtgcggagaaagttaaacgtgcagacgctgtcatcgacaataatggcacgattgaagaaacccgccgccagctgctggccattttacaccagtggaagctgctgggtaagggtggctccggccaccatcatcaccatcac

SEQ ID NO: 984 - protein, 211 aa, synthetic construct
  REGION 1..211: note = Variant of 3'O-kinase
MAFTIGLTGGIAAGKSTVSAMMRELGLPVIDADEAARAVMRPGEEAYRQIVAAFGPGILRADGEIDRQKLGAIRFSDEQQRKVLNAIVGPAVLKKMLAEKEAHIRSGAKTVVLDIPLLFESGLTHWVDKVLVVYVDDDVQLRRLMARNGFTEEEALKRIRSQWPSAEKVKRADAVIDNNGTIEETRRQLLAILHQWKLLGKGGSGHHHHHH

SEQ ID NO: 985 - DNA, 633 bp, synthetic construct
  misc_feature 1..633: note = Variant of 3'O-kinase
  source 1..633: mol_type = other DNA
atggcgtttaccattggtttaacaggagggatcgcagcgggcaaatcgactgtgagtgccatgatgcgtgaactgggtctgccggtcatcgatgctgacgagtctgcacgcgccgttatgcgtccaggcgaagaagcttatcgccagattgtagctgcgttcggtccgggcattcttcgtgccgatggcgagatcgatcgccagaaactgggtgctatccgcttttcggacgaacaacaacgtaaggtgctgaatgcgattgtaggtcctgcagtcctgaagaagatgctcgctgagaaagaagctcatatccgctcaggcgccaagacggttgtgctggatatcccgctgctgttcgaatccggattgacccattgggtcgacaaagtgctcgtggtgtacgtcgatgatgatgttcagttacgccgccttatggcacgtaacgggtttactgaagaagaagctctgaagcgcattcgttcacagtggcccagtgcggagaaagttaaacgtgcagacgctgtcatcgacaataatggcacgattgaagaaacccgccgccagctgctggccattttacaccagtgggatctgctgggtaagggtggctccggccaccatcatcaccatcac

SEQ ID NO: 986 - protein, 211 aa, synthetic construct
  REGION 1..211: note = Variant of 3'O-kinase
MAFTIGLTGGIAAGKSTVSAMMRELGLPVIDADESARAVMRPGEEAYRQIVAAFGPGILRADGEIDRQKLGAIRFSDEQQRKVLNAIVGPAVLKKMLAEKEAHIRSGAKTVVLDIPLLFESGLTHWVDKVLVVYVDDDVQLRRLMARNGFTEEEALKRIRSQWPSAEKVKRADAVIDNNGTIEETRRQLLAILHQWDLLGKGGSGHHHHHH

SEQ ID NO: 987 - DNA, 633 bp, synthetic construct
  misc_feature 1..633: note = Variant of 3'O-kinase
  source 1..633: mol_type = other DNA
atggcgtttaccatttttttaacaggagggatcgcagcgggcaaatcgactgtgagtgccatgatgcgtgaactgggtctgccggtcatcgatgctgacgaggcagcacgcgccgttatgcgtccaggcgaagaagcttatcgccagattgtagctgcgttcggtccgggcattcttcgtgccgatggcgagatcgatcgccagaaactgggtgctatccgcttttcggacgaacaacaacgtaaggtgctgaatgcgattgtaggtcctgcagtcctgaagaagatgctcgctgagaaagaagctcatatccgctcaggcgccaagacggttgtgctggatatcccgctgctgttcgaatccggattgacccattgggtcgacaaagtgctcgtggtgtacgtcgatgatgatgttcagttacgccgccttatggcacgtaacgggtttactgaagaagaagctctgaagcgcattcgttcacagtggcccagtgcggagaaagttaaacgtgcagacgctgtcatcgacaataatggcacgattgaagaaacccgccgccagctgctggccattttacaccagtgggatctgctgggtaagggtggctccggccaccatcatcaccatcac

SEQ ID NO: 988 - protein, 211 aa, synthetic construct
  REGION 1..211: note = Variant of 3'O-kinase
MAFTIFLTGGIAAGKSTVSAMMRELGLPVIDADEAARAVMRPGEEAYRQIVAAFGPGILRADGEIDRQKLGAIRFSDEQQRKVLNAIVGPAVLKKMLAEKEAHIRSGAKTVVLDIPLLFESGLTHWVDKVLVVYVDDDVQLRRLMARNGFTEEEALKRIRSQWPSAEKVKRADAVIDNNGTIEETRRQLLAILHQWDLLGKGGSGHHHHHH

SEQ ID NO: 989 - DNA, 633 bp, synthetic construct
  misc_feature 1..633: note = Variant of 3'O-kinase
  source 1..633: mol_type = other DNA
atggcgtttaccattggtttaacaggagggatcgcagcgggcaaatcgactgtgagtgccatgatgcgtgaactgggtctgccggtcatcgatgctgacgaggcagcacgcgccgttatgcgtccaggcgaagaagcttatcgccagattgtagctgcgttcggtccgggcattcttcgtgccgatggcgagatcgatcgccagaaactgggtgctatccgcttttcggacgaacaacaacgtaaggtgctgaatgcgattgtaggtcctgcagtcctgaagaagatgctcgctgagaaagaagctcatatcatttcaggcgccaagacggttgtgctggatatcccgctgctgttcgaatccggattgacccattgggtcgacaaagtgctcgtggtgtacgtcgatgatgatgttcagttacgccgccttatggcacgtaacgggtttactgaagaagaagctctgaagcgcattcgttcacagtggcccagtgcggagaaagttaaacgtgcagacgctgtcatcgacaataatggcacgattgaagaaacccgccgccagctgctggccattttacaccagtgggatctgctgggtaagggtggctccggccaccatcatcaccatcac

SEQ ID NO: 990 - protein, 211 aa, synthetic construct
  REGION 1..211: note = Variant of 3'O-kinase
MAFTIGLTGGIAAGKSTVSAMMRELGLPVIDADEAARAVMRPGEEAYRQIVAAFGPGILRADGEIDRQKLGAIRFSDEQQRKVLNAIVGPAVLKKMLAEKEAHIISGAKTVVLDIPLLFESGLTHWVDKVLVVYVDDDVQLRRLMARNGFTEEEALKRIRSQWPSAEKVKRADAVIDNNGTIEETRRQLLAILHQWDLLGKGGSGHHHHHH

SEQ ID NO: 991 - DNA, 633 bp, synthetic construct
  misc_feature 1..633: note = Variant of 3'O-kinase
  source 1..633: mol_type = other DNA
atggcgtttaccattggtttaacaggagggatcgcagcgggcaaatcgactgtgagtgccatgatgcgtgaactgggtctgccggtcatcgatgctgacgaggcagcacgcgccgttatgcgtccaggcgaagaagcttatcgccagattgtagctgcgttcggtccgggcattcttcgtgccgatggcgagatcgatcgccagaaactgggtgctatccgcttttcggacgaacaacaacgtaaggtgctgaatgcgattgtaggtcctgcagtcctgaagaagatgctcgctgagaaagaagctcatggtcgctcaggcgccaagacggttgtgctggatatcccgctgctgttcgaatccggattgacccattgggtcgacaaagtgctcgtggtgtacgtcgatgatgatgttcagttacgccgccttatggcacgtaacgggtttactgaagaagaagctctgaagcgcattcgttcacagtggcccagtgcggagaaagttaaacgtgcagacgctgtcatcgacaataatggcacgattgaagaaacccgccgccagctgctggccattttacaccagtgggatctgctgggtaagggtggctccggccaccatcatcaccatcac

SEQ ID NO: 992 - protein, 211 aa, synthetic construct
  REGION 1..211: note = Variant of 3'O-kinase
MAFTIGLTGGIAAGKSTVSAMMRELGLPVIDADEAARAVMRPGEEAYRQIVAAFGPGILRADGEIDRQKLGAIRFSDEQQRKVLNAIVGPAVLKKMLAEKEAHGRSGAKTVVLDIPLLFESGLTHWVDKVLVVYVDDDVQLRRLMARNGFTEEEALKRIRSQWPSAEKVKRADAVIDNNGTIEETRRQLLAILHQWDLLGKGGSGHHHHHH

SEQ ID NO: 993 - DNA, 633 bp, synthetic construct
  misc_feature 1..633: note = Variant of 3'O-kinase
  source 1..633: mol_type = other DNA
atggcgtttaccattggtttaacaggagggatcgcagcgggcaaatcgactgtgagtgccatgatgcgtgaactgggtctgccggtcatcgatgctgacgaggcagcacgcgccgttatgcgtccaggcgaagaagcttatcgccagattgtagctgcgttcggtccgggcattcttcgtgccgatggcgagatcgatcgccagaaactgggtgctatccgcttttcggacgaacaacaacgtaaggtgctgaatgcgattgtaggtcctgcagtcctgaagaagatgctcgctgagaaagaagctcatatcatgtcaggcgccaagacggttgtgctggatatcccgctgctgttcgaatccggattgacccattgggtcgacaaagtgctcgtggtgtacgtcgatgatgatgttcagttacgccgccttatggcacgtaacgggtttactgaagaagaagctctgaagcgcattcgttcacagtggcccagtgcggagaaagttaaacgtgcagacgctgtcatcgacaataatggcacgattgaagaaacccgccgccagctgctggccattttacaccagtgggatctgctgggtaagggtggctccggccaccatcatcaccatcac

SEQ ID NO: 994 - protein, 211 aa, synthetic construct
  REGION 1..211: note = Variant of 3'O-kinase
MAFTIGLTGGIAAGKSTVSAMMRELGLPVIDADEAARAVMRPGEEAYRQIVAAFGPGILRADGEIDRQKLGAIRFSDEQQRKVLNAIVGPAVLKKMLAEKEAHIMSGAKTVVLDIPLLFESGLTHWVDKVLVVYVDDDVQLRRLMARNGFTEEEALKRIRSQWPSAEKVKRADAVIDNNGTIEETRRQLLAILHQWDLLGKGGSGHHHHHH

SEQ ID NO: 995 - DNA, 633 bp, synthetic construct
  misc_feature 1..633: note = Variant of 3'O-kinase
  source 1..633: mol_type = other DNA
atggcgtttaccattggtttaacaggagggatcgcagcgggcaaatcgactgtgagtgccatgatgcgtgaactgggtctgccggtcatcgatgctgacgaggcagcacgcgccgttatgcgtccaggcgaagaagcttatcgccagattgtagctgcgttcggtccgggcattcttcgtgccgatggcgagatcgatcgccagaaactgggtgctatccgcttttcggacgaacaacaacgtaaggtgctgaatgcgattgtaggtcctgcagtcctgaagaagatgctcgctgagaaagaagctcatatccgctcaggcgccaagacggttgtgctggatatcccgctgctgttcgaatccggattgacccattgggtcgacaaagtgctcgtggtgtacgtcgatgatgatgttcagttacgccgccttatggcacgtaacgggtttactgaagaagaagctctgaagcgcattcgttcacagtggcccagtgcggagaaagtttatcgtgcagacgctgtcatcgacaataatggcacgattgaagaaacccgccgccagctgctggccattttacaccagtgggatctgctgggtaagggtggctccggccaccatcatcaccatcac

SEQ ID NO: 996 - protein, 211 aa, synthetic construct
  REGION 1..211: note = Variant of 3'O-kinase
MAFTIGLTGGIAAGKSTVSAMMRELGLPVIDADEAARAVMRPGEEAYRQIVAAFGPGILRADGEIDRQKLGAIRFSDEQQRKVLNAIVGPAVLKKMLAEKEAHIRSGAKTVVLDIPLLFESGLTHWVDKVLVVYVDDDVQLRRLMARNGFTEEEALKRIRSQWPSAEKVYRADAVIDNNGTIEETRRQLLAILHQWDLLGKGGSGHHHHHH

SEQ ID NO: 997 - DNA, 633 bp, synthetic construct
  misc_feature 1..633: note = Variant of 3'O-kinase
  source 1..633: mol_type = other DNA
atggcgtttaccattggtttaacaggagggatcgcagcgggcaaatcgactgtgagtgccatgatgcgtgaactgggtctgccggtcatcgatgctgacgaggcagcacgcgccgttatgcgtccaggcgaagaagcttatcgccagattgtagctgcgttcggtccgggcattcttcgtgccgatggcgagatcgatcgccagaaactgggtgctatccgcttttcggacgaacaacaacgtaaggtgctgaatgcgattgtaggtcctgcagtcctgaagaagatgctcgctgagaaagaagctcatatccgctcaggcgccaagacggttgtgctggatatcccgctgctgttcgaatccggattgacccattgggtcgacaaagtgctcgtggtgtacgtcgatgatgatgttcagttacgccgccttatggcacgtaacgggtttactgaagaagaagctctgaagcgcattcgttcacagtggcccagtgcggagaaagttaaacgtgcagacgctgtcatcgacaataatggcacgattgaagaaacccgccgccagctgctggccattttacaccagtgggatctgctgggtaagggtggccggggccaccatcatcaccatcac

SEQ ID NO: 998 - protein, 211 aa, synthetic construct
  REGION 1..211: note = Variant of 3'O-kinase
MAFTIGLTGGIAAGKSTVSAMMRELGLPVIDADEAARAVMRPGEEAYRQIVAAFGPGILRADGEIDRQKLGAIRFSDEQQRKVLNAIVGPAVLKKMLAEKEAHIRSGAKTVVLDIPLLFESGLTHWVDKVLVVYVDDDVQLRRLMARNGFTEEEALKRIRSQWPSAEKVKRADAVIDNNGTIEETRRQLLAILHQWDLLGKGGRGHHHHHH

SEQ ID NO: 999 - DNA, 633 bp, synthetic construct
  misc_feature 1..633: note = Variant of 3'O-kinase
  source 1..633: mol_type = other DNA
atggcgtttaccattggtttaacaggagggatcgcagcgggcaaatcgactgtgagtgccatgatgcgtgaactgggtctgccggtcatcgatgctgacgaggcagcacgcgccgttatgcgtccaggcgaagaagcttatcgccagattgtagctgcgttcggtccgggcattcttcgtgccgatggcgagatcgatcgccagaaactgggtgctatccgcttttcggacgaacaacaacgtaaggtgctgaatgcgattgtaggtcctgcagtcctgaagaagatgctcgctgagaaagaagctcatatccgctcaggcgccaagacggttgtgctggatatcccgctgctgttcgaatccggattgacccattgggtcgacaaagtgctcgtggtgtacgtcgatgatgatgttcagttacgccgccttatggcacgtaacctttttactgaagaagaagctctgaagcgcattcgttcacagtggcccagtgcggagaaagttaaacgtgcagacgctgtcatcgacaataatggcacgattgaagaaacccgccgccagctgctggccattttacaccagtgggatctgctgggtaagggtggctccggccaccatcatcaccatcac

SEQ ID NO: 1000 - protein, 211 aa, synthetic construct
  REGION 1..211: note = Variant of 3'O-kinase
MAFTIGLTGGIAAGKSTVSAMMRELGLPVIDADEAARAVMRPGEEAYRQIVAAFGPGILRADGEIDRQKLGAIRFSDEQQRKVLNAIVGPAVLKKMLAEKEAHIRSGAKTVVLDIPLLFESGLTHWVDKVLVVYVDDDVQLRRLMARNLFTEEEALKRIRSQWPSAEKVKRADAVIDNNGTIEETRRQLLAILHQWDLLGKGGSGHHHHHH

SEQ ID NO: 1001 - DNA, 633 bp, synthetic construct
  misc_feature 1..633: note = Variant of 3'O-kinase
  source 1..633: mol_type = other DNA
atggcgtttaccattggtttaacaggagggatcgcagcgggcaaatcgactgtgagtgccatgatgcgtgaactgggtctgccggtcatcgatgctgacgaggcagcacgcgccgttatgcgtccaggcgaagaagcttatcgccagattgtagctgcgttcggtccgggcattcttcgtgccgatggcgagatcgatcgccagaaactgggtgctatccgcttttcggacgaacaacaacgtaaggtgctgaatgcgattgtaggtcctgcagtcctgaagaagatgctcgctgagaaagaagctcatatccgctcaggcgccaagacggttgtgctggatatcccgctgctgttcgaatccggattgacccattgggtcgacaaagtgctcgtggtgtacgtctttgatgatgttcagttacgccgccttatggcacgtaacgggtttactgaagaagaagctctgaagcgcattcgttcacagtggcccagtgcggagaaagttaaacgtgcagacgctgtcatcgacaataatggcacgattgaagaaacccgccgccagctgctggccattttacaccagtgggatctgctgggtaagggtggctccggccaccatcatcaccatcac

SEQ ID NO: 1002 - protein, 211 aa, synthetic construct
  REGION 1..211: note = Variant of 3'O-kinase
MAFTIGLTGGIAAGKSTVSAMMRELGLPVIDADEAARAVMRPGEEAYRQIVAAFGPGILRADGEIDRQKLGAIRFSDEQQRKVLNAIVGPAVLKKMLAEKEAHIRSGAKTVVLDIPLLFESGLTHWVDKVLVVYVFDDVQLRRLMARNGFTEEEALKRIRSQWPSAEKVKRADAVIDNNGTIEETRRQLLAILHQWDLLGKGGSGHHHHHH

SEQ ID NO: 1003 - DNA, 633 bp, synthetic construct
  misc_feature 1..633: note = Variant of 3'O-kinase
  source 1..633: mol_type = other DNA
atggcgtttaccattggtttaacaggagggatcgcagcgggcaaatcgactgtgagtgccatgatgcgtgaactgggtctgccggtcatcgatgctgacgaggcagcacgcgccgttatgcgtccaggcgaagaagcttatcgccagattgtagctgcgttcggtccgggcattcttcgtgccgatggcgagatcgatcgccagaaactgggtgctatccgcttttcggacgaacaacaacgtaaggtgctgaatgcgattgtaggtcctgcagtcctgaagaagatgctcgctgagaaagaagctcatatccgctcaggcgccaagacggttgtgctggatatcccgctgctgttcgaatccggattgacccattgggtcgacaaagtgctcgtggtgtacgtcgatgatgatgttcagttacgccgccttatggcacgtaacgggtttactgaagaagaagctctgaagcgcattcgttcacagtggcccagtgcggagaaagttaaacgtgcagacgctgtcatcgacaataatggcacgattgaagaaacccgccgccagctgctggccattttacaccagtgggatctgacgggtaagggtggctccggccaccatcatcaccatcac

SEQ ID NO: 1004 - protein, 211 aa, synthetic construct
  REGION 1..211: note = Variant of 3'O-kinase
MAFTIGLTGGIAAGKSTVSAMMRELGLPVIDADEAARAVMRPGEEAYRQIVAAFGPGILRADGEIDRQKLGAIRFSDEQQRKVLNAIVGPAVLKKMLAEKEAHIRSGAKTVVLDIPLLFESGLTHWVDKVLVVYVDDDVQLRRLMARNGFTEEEALKRIRSQWPSAEKVKRADAVIDNNGTIEETRRQLLAILHQWDLTGKGGSGHHHHHH

SEQ ID NO: 1005 - DNA, 633 bp, synthetic construct
  misc_feature 1..633: note = Variant of 3'O-kinase
  source 1..633: mol_type = other DNA
atggcgtttaccatttgtttaacaggagggatcgcagcgggcaaatcgactgtgagtgccatgatgcgtgaactgggtctgccggtcatcgatgctgacgaggcagcacgcgccgttatgcgtccaggcgaagaagcttatcgccagattgtagctgcgttcggtccgggcattcttcgtgccgatggcgagatcgatcgccagaaactgggtgctatccgcttttcggacgaacaacaacgtaaggtgctgaatgcgattgtaggtcctgcagtcctgaagaagatgctcgctgagaaagaagctcatatccgctcaggcgccaagacggttgtgctggatatcccgctgctgttcgaatccggattgacccattgggtcgacaaagtgctcgtggtgtacgtcgatgatgatgttcagttacgccgccttatggcacgtaacgggtttactgaagaagaagctctgaagcgcattcgttcacagtggcccagtgcggagaaagttaaacgtgcagacgctgtcatcgacaataatggcacgattgaagaaacccgccgccagctgctggccattttacaccagtgggatctgctgggtaagggtggctccggccaccatcatcaccatcac

SEQ ID NO: 1006 - protein, 211 aa, synthetic construct
  REGION 1..211: note = Variant of 3'O-kinase
MAFTICLTGGIAAGKSTVSAMMRELGLPVIDADEAARAVMRPGEEAYRQIVAAFGPGILRADGEIDRQKLGAIRFSDEQQRKVLNAIVGPAVLKKMLAEKEAHIRSGAKTVVLDIPLLFESGLTHWVDKVLVVYVDDDVQLRRLMARNGFTEEEALKRIRSQWPSAEKVKRADAVIDNNGTIEETRRQLLAILHQWDLLGKGGSGHHHHHH

SEQ ID NO: 1007 - DNA, 633 bp, synthetic construct
  misc_feature 1..633: note = Variant of 3'O-kinase
  source 1..633: mol_type = other DNA
atggcgtttaccattggtttaacaggagggatcgcagcgggcaaatcgactgtgagtgccatgatgcgtgaactgggtctgccggtcatcgatgctgacgaggcagcacgcgccgttatgcgtccaggcgaagaagcttatcgccagattgtagctgcgttcggtccgggcattcttcgtgccgatggcgagatcgatcgccagaaactgggtgctatccgcttttcggacgaacaacaacgtaaggtgctgaatgcgattgtaggtcctgcagtcctgaagaagatgctcgctgagaaagaagctcatatccgctcaggcgccaagacggttgtgctggatatcccgctgctgttcgaatccggattgacccattgggtcgacaaagtgctcgtggtgtacgtcgatgatgatgttcagttacgccgccttatggcacgtaacaagtttactgaagaagaagctctgaagcgcattcgttcacagtggcccagtgcggagaaagttaaacgtgcagacgctgtcatcgacaataatggcacgattgaagaaacccgccgccagctgctggccattttacaccagtgggatctgctgggtaagggtggctccggccaccatcatcaccatcac

SEQ ID NO: 1008 - protein, 211 aa, synthetic construct
  REGION 1..211: note = Variant of 3'O-kinase
MAFTIGLTGGIAAGKSTVSAMMRELGLPVIDADEAARAVMRPGEEAYRQIVAAFGPGILRADGEIDRQKLGAIRFSDEQQRKVLNAIVGPAVLKKMLAEKEAHIRSGAKTVVLDIPLLFESGLTHWVDKVLVVYVDDDVQLRRLMARNKFTEEEALKRIRSQWPSAEKVKRADAVIDNNGTIEETRRQLLAILHQWDLLGKGGSGHHHHHH

SEQ ID NO: 1009 - DNA, 633 bp, synthetic construct
  misc_feature 1..633: note = Variant of 3'O-kinase
  source 1..633: mol_type = other DNA
atggcgtttaccattggtttaacaggagggatcgcagcgggcaaatcgactgtgagtgccatgatgcgtgaactgggtctgccggtcatcgatgctgacgaggcagcacgcgccgttatgcgtccaggcgaagaagcttatcgccagattgtagctgcgttcggtgagggcattcttcgtgccgatggcgagatcgatcgccagaaactgggtgctatccgcttttcggacgaacaacaacgtaaggtgctgaatgcgattgtaggtcctgcagtcctgaagaagatgctcgctgagaaagaagctcatatccgctcaggcgccaagacggttgtgctggatatcccgctgctgttcgaatccggattgacccattgggtcgacaaagtgctcgtggtgtacgtcgatgatgatgttcagttacgccgccttatggcacgtaacgggtttactgaagaagaagctctgaagcgcattcgttcacagtggcccagtgcggagaaagttaaacgtgcagacgctgtcatcgacaataatggcacgattgaagaaacccgccgccagctgctggccattttacaccagtgggatctgctgggtaagggtggctccggccaccatcatcaccatcac

SEQ ID NO: 1010 - protein, 211 aa, synthetic construct
  REGION 1..211: note = Variant of 3'O-kinase
MAFTIGLTGGIAAGKSTVSAMMRELGLPVIDADEAARAVMRPGEEAYRQIVAAFGEGILRADGEIDRQKLGAIRFSDEQQRKVLNAIVGPAVLKKMLAEKEAHIRSGAKTVVLDIPLLFESGLTHWVDKVLVVYVDDDVQLRRLMARNGFTEEEALKRIRSQWPSAEKVKRADAVIDNNGTIEETRRQLLAILHQWDLLGKGGSGHHHHHH

SEQ ID NO: 1011 - DNA, 633 bp, synthetic construct
  misc_feature 1..633: note = Variant of 3'O-kinase
  source 1..633: mol_type = other DNA
atggcgtttaccattggtttaacaggagggatcgcagcgggcaaatcgactgtgagtgccatgatgcgtgaactgggtctgccggtcatcgatgctgacgaggcagcacgcgccgttatgcgtccaggcgaagaagcttatcgccagattgtagctgcgttcggtccgggcattcttcgtgccgatggcgagatcgatcgccagaaactgggtgctatccgcttttcggacgaacaacaacgtaaggtgctgaatgcgattgtaggtcctgcagtcctgaagaagatgctcgctgagaaagaagctcatatccgctcaggcgccaagacggttgtgctggatatcccgctgctgttcgaatccggattgacccattgggtcgacaaagtgctcgtggtgtacgtcgatgatgatgttcagttacgccgccttatggcacgtaacgggtttactgaagaagaagctctgaagcgcattcgttcacagtggcccagtgcggagaaagttaaacgtgcacatgctgtcatcgacaataatggcacgattgaagaaacccgccgccagctgctggccattttacaccagtgggatctgctgggtaagggtggctccggccaccatcatcaccatcac

SEQ ID NO: 1012 - protein, 211 aa, synthetic construct
  REGION 1..211: note = Variant of 3'O-kinase
MAFTIGLTGGIAAGKSTVSAMMRELGLPVIDADEAARAVMRPGEEAYRQIVAAFGPGILRADGEIDRQKLGAIRFSDEQQRKVLNAIVGPAVLKKMLAEKEAHIRSGAKTVVLDIPLLFESGLTHWVDKVLVVYVDDDVQLRRLMARNGFTEEEALKRIRSQWPSAEKVKRAHAVIDNNGTIEETRRQLLAILHQWDLLGKGGSGHHHHHH

SEQ ID NO: 1013 - DNA, 633 bp, synthetic construct
  misc_feature 1..633: note = Variant of 3'O-kinase
  source 1..633: mol_type = other DNA
atggcgtttaccattggtttaacaggagggatcgcagcgggcaaatcgactgtgagtgccatgatgcgtgaactgggtctgccggtcatcgatgctgacgaggcagcacgcgccgttatgcgtccaggcgaagaagcttatcgccagattgtagctgcgttcggtccgggcattcttcgtgccgatggcgagatcgatcgccagaaactgggtgctatccgcttttcggacgaacaacaacgtaaggtgctgaatgcgattgtaggtcctgcagtcctgaagaagatgctcgctgagaaagaagctcatatccgctcaggcgccaagacggttgtgctggatatcccgctgctgttcgaatccggattgacccattgggtcgacaaagtgctcgtggtgtacgtcgatgatgatgttcagttacgccgccttatggcacgtaacgggtttactgaagaagaagctctgaagcgcattcgttcacagtggcccagtgcggagaaagtttgtcgtgcagacgctgtcatcgacaataatggcacgattgaagaaacccgccgccagctgctggccattttacaccagtgggatctgctgggtaagggtggctccggccaccatcatcaccatcac

SEQ ID NO: 1014 - protein, 211 aa, synthetic construct
  REGION 1..211: note = Variant of 3'O-kinase
MAFTIGLTGGIAAGKSTVSAMMRELGLPVIDADEAARAVMRPGEEAYRQIVAAFGPGILRADGEIDRQKLGAIRFSDEQQRKVLNAIVGPAVLKKMLAEKEAHIRSGAKTVVLDIPLLFESGLTHWVDKVLVVYVDDDVQLRRLMARNGFTEEEALKRIRSQWPSAEKVCRADAVIDNNGTIEETRRQLLAILHQWDLLGKGGSGHHHHHH

SEQ ID NO: 1015 - DNA, 633 bp, synthetic construct
  misc_feature 1..633: note = Variant of 3'O-kinase
  source 1..633: mol_type = other DNA
atggcgtttaccattggtttaacaggagggatcgcagcgggcaaatcgactgtgagtgccatgatgcgtgaactgggtctgccggtcatcgatgctgacgaggcagcacgcgccgttatgcgtccaggcgaagaagcttatcgccagattgtagctgcgttcggtccgggcattcttcgtgccgatggcgagatcgatcgccagaaactgggtgctatccgcttttcggacgaacaacaacgtaaggtgctgaatgcgattgtaggtcctgcagtcctgaagaagatgctcgctgagaaagaagctcatatccgctcaggcgccaagacggttgtgctggatatcccgctgctgttcgaatccggattgacccattgggtcgacaaagtgctcgtggtgtacgtcgatgatgatgttcagttacgccgccttatggcacgtaacgggtttactgaatctgaagctctgaagcgcattcgttcacagtggcccagtgcggagaaagttaaacgtgcagacgctgtcatcgacaataatggcacgattgaagaaacccgccgccagctgctggccattttacaccagtgggatctgctgggtaagggtggctccggccaccatcatcaccatcac

SEQ ID NO: 1016 - protein, 211 aa, synthetic construct
  REGION 1..211: note = Variant of 3'O-kinase
MAFTIGLTGGIAAGKSTVSAMMRELGLPVIDADEAARAVMRPGEEAYRQIVAAFGPGILRADGEIDRQKLGAIRFSDEQQRKVLNAIVGPAVLKKMLAEKEAHIRSGAKTVVLDIPLLFESGLTHWVDKVLVVYVDDDVQLRRLMARNGFTESEALKRIRSQWPSAEKVKRADAVIDNNGTIEETRRQLLAILHQWDLLGKGGSGHHHHHH

SEQ ID NO: 1017 - DNA, 633 bp, synthetic construct
  misc_feature 1..633: note = Variant of 3'O-kinase
  source 1..633: mol_type = other DNA
atggcgtttaccattggtttaacaggagggatcgcagcgggcaaatcgactgtgagtgccatggagcgtgaactgggtctgccggtcatcgatgctgacgaggcagcacgcgccgttatgcgtccaggcgaagaagcttatcgccagattgtagctgcgttcggtccgggcattcttcgtgccgatggcgagatcgatcgccagaaactgggtgctatccgcttttcggacgaacaacaacgtaaggtgctgaatgcgattgtaggtcctgcagtcctgaagaagatgctcgctgagaaagaagctcatatccgctcaggcgccaagacggttgtgctggatatcccgctgctgttcgaatccggattgacccattgggtcgacaaagtgctcgtggtgtacgtcgatgatgatgttcagttacgccgccttatggcacgtaacgggtttactgaagaagaagctctgaagcgcattcgttcacagtggcccagtgcggagaaagttaaacgtgcagacgctgtcatcgacaataatggcacgattgaagaaacccgccgccagctgctggccattttacaccagtgggatctgctgggtaagggtggctccggccaccatcatcaccatcac

SEQ ID NO: 1018 - protein, 211 aa, synthetic construct
  REGION 1..211: note = Variant of 3'O-kinase
MAFTIGLTGGIAAGKSTVSAMERELGLPVIDADEAARAVMRPGEEAYRQIVAAFGPGILRADGEIDRQKLGAIRFSDEQQRKVLNAIVGPAVLKKMLAEKEAHIRSGAKTVVLDIPLLFESGLTHWVDKVLVVYVDDDVQLRRLMARNGFTEEEALKRIRSQWPSAEKVKRADAVIDNNGTIEETRRQLLAILHQWDLLGKGGSGHHHHHH

SEQ ID NO: 1019 - DNA, 633 bp, synthetic construct
  misc_feature 1..633: note = Variant of 3'O-kinase
  source 1..633: mol_type = other DNA
atggcgtttaccattggtttaacaggagggatcgcagcgggcaaatcgactgtgagtgccatgatgcgtgaactgggtctgccggtcatcgatgctgacgaggcagcacgcgccgttatgcgtccaggcccggaagcttatcgccagattgtagctgcgttcggtccgggcattcttcgtgccgatggcgagatcgatcgccagaaactgggtgctatccgcttttcggacgaacaacaacgtaaggtgctgaatgcgattgtaggtcctgcagtcctgaagaagatgctcgctgagaaagaagctcatatccgctcaggcgccaagacggttgtgctggatatcccgctgctgttcgaatccggattgacccattgggtcgacaaagtgctcgtggtgtacgtcgatgatgatgttcagttacgccgccttatggcacgtaacgggtttactgaagaagaagctctgaagcgcattcgttcacagtggcccagtgcggagaaagttaaacgtgcagacgctgtcatcgacaataatggcacgattgaagaaacccgccgccagctgctggccattttacaccagtgggatctgctgggtaagggtggctccggccaccatcatcaccatcac

SEQ ID NO: 1020 - protein, 211 aa, synthetic construct
  REGION 1..211: note = Variant of 3'O-kinase
MAFTIGLTGGIAAGKSTVSAMMRELGLPVIDADEAARAVMRPGPEAYRQIVAAFGPGILRADGEIDRQKLGAIRFSDEQQRKVLNAIVGPAVLKKMLAEKEAHIRSGAKTVVLDIPLLFESGLTHWVDKVLVVYVDDDVQLRRLMARNGFTEEEALKRIRSQWPSAEKVKRADAVIDNNGTIEETRRQLLAILHQWDLLGKGGSGHHHHHH

SEQ ID NO: 1021 - DNA, 633 bp, synthetic construct
  misc_feature 1..633: note = Variant of 3'O-kinase
  source 1..633: mol_type = other DNA
atggcgtttaccattggtttaacaggagggatcgcagcgggcaaatcgactgtgagtgccatgatgcgtgaactgggtctgccggtcatcgatgctgacgaggcagcacgcgccgttatgcgtccaggcgaagaagcttatcgccagattgtagctgcgttcggtccgggcattcttcgtgccgatggcgagatcgatcgccagaaactgggtgctatccgcttttcggacgaacaacaacgtaaggtgctgaatgcgattgtaggtcctgcagtcctgaagaagatgctcgctgagaaagaagctcatatccgctcaggcgccaagacggttgtgctggatatcccgctgctgttcgaatccggattgacccattgggtcgacaaagtgctcgtggtgtacgtcgatgatgatgttcagttacgccgccttatggcacgtaacgggtttactgaagaagaagctctgaagcgcattcgttcacagtggcccagtgcggagaaagttaaacgtgcagtggctgtcatcgacaataatggcacgattgaagaaacccgccgccagctgctggccattttacaccagtgggatctgctgggtaagggtggctccggccaccatcatcaccatcac

SEQ ID NO: 1022 - protein, 211 aa, synthetic construct
  REGION 1..211: note = Variant of 3'O-kinase
MAFTIGLTGGIAAGKSTVSAMMRELGLPVIDADEAARAVMRPGEEAYRQIVAAFGPGILRADGEIDRQKLGAIRFSDEQQRKVLNAIVGPAVLKKMLAEKEAHIRSGAKTVVLDIPLLFESGLTHWVDKVLVVYVDDDVQLRRLMARNGFTEEEALKRIRSQWPSAEKVKRAVAVIDNNGTIEETRRQLLAILHQWDLLGKGGSGHHHHHH

SEQ ID NO: 1023 - DNA, 633 bp, synthetic construct
  misc_feature 1..633: note = Variant of 3'O-kinase
  source 1..633: mol_type = other DNA
atggcgtttaccattggtttaacaggagggatcgcagcgggcaaatcgactgtgagtgccatgatgcgtgaactgggtctgccggtcatcgatgctgacgaggcagcacgcgccgttatgcgtccaggcgaagaagcttatcgccagattgtagctgcgttcggtccgggcattcttcgtgccgatggcgagatcgatcgccagaaactgggtgctatccgcttttcggacgaacaacaacgtaaggtgctgaatgcgattgtaggtcctgcagtcctgaagaagatgctcgctgagaaagaagctcatatccgctcaggcgcccggacggttgtgctggatatcccgctgctgttcgaatccggattgacccattgggtcgacaaagtgctcgtggtgtacgtcgatgatgatgttcagttacgccgccttatggcacgtaacgggtttactgaagaagaagctctgaagcgcattcgttcacagtggcccagtgcggagaaagttaaacgtgcagacgctgtcatcgacaataatggcacgattgaagaaacccgccgccagctgctggccattttacaccagtgggatctgctgggtaagggtggctccggccaccatcatcaccatcac

SEQ ID NO: 1024 - protein, 211 aa, synthetic construct
  REGION 1..211: note = Variant of 3'O-kinase
MAFTIGLTGGIAAGKSTVSAMMRELGLPVIDADEAARAVMRPGEEAYRQIVAAFGPGILRADGEIDRQKLGAIRFSDEQQRKVLNAIVGPAVLKKMLAEKEAHIRSGARTVVLDIPLLFESGLTHWVDKVLVVYVDDDVQLRRLMARNGFTEEEALKRIRSQWPSAEKVKRADAVIDNNGTIEETRRQLLAILHQWDLLGKGGSGHHHHHH

SEQ ID NO: 1025 - DNA, 633 bp, synthetic construct
  misc_feature 1..633: note = Variant of 3'O-kinase
  source 1..633: mol_type = other DNA
atggcgtttaccattggtttaacaggagggatcgcagcgggcaaatcgactgtgagtgccatgatgcgtgaactgggtctgccggtcatcgatgctgacgaggcagcacgcgccgttatgcgtccaggcgaagaagcttatcgccagattgtagctgcgttcggtccgggcattcttcgtgccgatattgagatcgatcgccagaaactgggtgctatccgcttttcggacgaacaacaacgtaaggtgctgaatgcgattgtaggtcctgcagtcctgaagaagatgctcgctgagaaagaagctcatatccgctcaggcgccaagacggttgtgctggatatcccgctgctgttcgaatccggattgacccattgggtcgacaaagtgctcgtggtgtacgtcgatgatgatgttcagttacgccgccttatggcacgtaacgggtttactgaagaagaagctctgaagcgcattcgttcacagtggcccagtgcggagaaagttaaacgtgcagacgctgtcatcgacaataatggcacgattgaagaaacccgccgccagctgctggccattttacaccagtgggatctgctgggtaagggtggctccggccaccatcatcaccatcac

SEQ ID NO: 1026 - protein, 211 aa, synthetic construct
  REGION 1..211: note = Variant of 3'O-kinase
MAFTIGLTGGIAAGKSTVSAMMRELGLPVIDADEAARAVMRPGEEAYRQIVAAFGPGILRADIEIDRQKLGAIRFSDEQQRKVLNAIVGPAVLKKMLAEKEAHIRSGAKTVVLDIPLLFESGLTHWVDKVLVVYVDDDVQLRRLMARNGFTEEEALKRIRSQWPSAEKVKRADAVIDNNGTIEETRRQLLAILHQWDLLGKGGSGHHHHHH

SEQ ID NO: 1027 - DNA, 633 bp, synthetic construct
  misc_feature 1..633: note = Variant of 3'O-kinase
  source 1..633: mol_type = other DNA
atggcgtttaccattggtttaacaggagggatcgcagcgggcaaatcgactgtgagtgccatgatgcgtgaactgggtctgccggtcatcgatgctgacgaggcagcacgcgccgttatgaagccaggcgaagaagcgtatcgccagattgtagctgcgttcggtccgggcattcttcgtgccgatggcgagatcgatcgccagaaactgggtgctatccgcttttcggacgaacaacaacgcaaggtgctgaatgcgattgtaggtcctgcagtcctgaagaagatgctcgctgagaaagaagctcatatccgctcaggcgccaagacggttgtgctggatatcccgctgctgttcgaatccggattgacccatctggtcgacaaagtgctcgtggtgtacgatgatgatgatgttcagttaaagcgccttatggcacgtaacgggtttactgaagaagaagctctgaagcgcattcgttcacagtggcccagtgcggagaaagttaaacgtgcagacgctgtcatcgacaataatggcaatattgaagaaacccgccgccagctgctggacattttacaccagtgggatctgctgggtaagggtggctccggccaccatcatcaccatcac

SEQ ID NO: 1028 - protein, 211 aa, synthetic construct
  REGION 1..211: note = Variant of 3'O-kinase
MAFTIGLTGGIAAGKSTVSAMMRELGLPVIDADEAARAVMKPGEEAYRQIVAAFGPGILRADGEIDRQKLGAIRFSDEQQRKVLNAIVGPAVLKKMLAEKEAHIRSGAKTVVLDIPLLFESGLTHLVDKVLVVYDDDDVQLKRLMARNGFTEEEALKRIRSQWPSAEKVKRADAVIDNNGNIEETRRQLLDILHQWDLLGKGGSGHHHHHH

SEQ ID NO: 1029 - DNA, 633 bp, synthetic construct
  misc_feature 1..633: note = Variant of 3'O-kinase
  source 1..633: mol_type = other DNA
atggcggttaccattggtttaacaggagggatcgcagcgggcaaatcgactgtgagtgccatgatgcgtgaactgggtctgccggtcatcgatgctgacgaggcagcacgcgccgttatgaagccaggcgaagaagcgtatcgcgacattgtagctgcgttcggtccgggcattcttcgtgaggatggcgagatcgatcgccagaaactgggtgctatccgcttttcggacgaacaacaacgcaaggtgctgaattcgattgtaggtcctgcagtcctgaagaagatgctcgctgagaaagaagctcatatccgctcaggcgccaagacggttgtgctggatatcccgctgctgttcgaatccggattgcaacagtgggtcgacaaagtgctcgtggtgtacgtcgatgatgatgttcagttacgccgccttatggcacgtaacgggtttactgaagaagaagctctgaagcgcattcgttcacagtggcccagtgcggagaaagttaaaatggcagacgctgtcatcgacaataatggcaatattgaagaaacccgccgccagctgctggacattttacaccagtgggatctgctggacaagggtggctccggccaccatcatcaccatcac

SEQ ID NO: 1030 - protein, 211 aa, synthetic construct
  REGION 1..211: note = Variant of 3'O-kinase
MAVTIGLTGGIAAGKSTVSAMMRELGLPVIDADEAARAVMKPGEEAYRDIVAAFGPGILREDGEIDRQKLGAIRFSDEQQRKVLNSIVGPAVLKKMLAEKEAHIRSGAKTVVLDIPLLFESGLQQWVDKVLVVYVDDDVQLRRLMARNGFTEEEALKRIRSQWPSAEKVKMADAVIDNNGNIEETRRQLLDILHQWDLLDKGGSGHHHHHH

SEQ ID NO: 1031 - DNA, 633 bp, synthetic construct
  misc_feature 1..633: note = Variant of 3'O-kinase
  source 1..633: mol_type = other DNA
atggcgtttaccattggtttaacaggagggatcgcagcgggcaaatcgactgtgagtgccatgatgcgtgaactgggtctgccggtcatcgatgctgacgaggcagcacgcgccgttatgaagccaggcgaagaagcgtatcgccaggttgtagctgcgttcggtccgggcattcttcgtgccgatggcgagatcgatcgccagaaactgggtgctatccgcttttcggacgaacaacaacgtaaggtgctgaattcgattgtaggtcctgaggtcctgaagaagatgctcgctgagaaagaagctcatatccgctcaggcgccaagacggtcgtgctggatatcccgctgctgttcgaatccggattgacccatgtggtcgacaaagtgctcgtggtgtacgatgatgatgatgttcagttacgccgccttatggcacgtaacgggtttactgaagaagaagctctgaagcgcattcgttcacagtggcccagtgcggagaaagttaaacgtgcagacgctgtgatcgacaataatggcaatattgaagaaacccgccgccagctgctggacattttacaccagtgggatctgctgggtaagggtggctccggccaccatcatcaccatcac

SEQ ID NO: 1032 - protein, 211 aa, synthetic construct
  REGION 1..211: note = Variant of 3'O-kinase
MAFTIGLTGGIAAGKSTVSAMMRELGLPVIDADEAARAVMKPGEEAYRQVVAAFGPGILRADGEIDRQKLGAIRFSDEQQRKVLNSIVGPEVLKKMLAEKEAHIRSGAKTVVLDIPLLFESGLTHVVDKVLVVYDDDDVQLRRLMARNGFTEEEALKRIRSQWPSAEKVKRADAVIDNNGNIEETRRQLLDILHQWDLLGKGGSGHHHHHH

SEQ ID NO: 1033 - DNA, 633 bp, synthetic construct
  misc_feature 1..633: note = Variant of 3'O-kinase
  source 1..633: mol_type = other DNA
atggcggttaccattggtttaacaggagggatcgcagcgggcaaatcgactgtgagtgccatgatgcgtgaactgggtctgccggtcatcgatgctgacgaggcagcacgcgccgttatgaagccaggcgaagaagcgtatcgcgacattgtagctgcgttcggtccgggcattcttcgtgaggatggcgagatcgatcgccagaaactgggtgctatccgcttttcggacgaacaacaactgaaggtgctgaattcgattgtaggtcctgcagtcctgaagaagatgctcgctgagaaagaagctcatatccgctcaggcgccaagacggttgtgctggatatcccgctgctgttcgaatccggattgcaacagtgggtcgacaaagtgctcgtggtgtacgtcgatgatgatgttcagttacgccgccttatggcacgtaacgggtttactgaagaagaagctctgaagcgcattcgttcacagtggcccagtgcggagaaagttaaacgcgcagacgctgtcatcgacaataatggcaatattgaagaaacccgccgccagctgctggacattttacaccagtgggatctgctggacaagggtggctccggccaccatcatcaccatcac

SEQ ID NO: 1034 - protein, 211 aa, synthetic construct
  REGION 1..211: note = Variant of 3'O-kinase
MAVTIGLTGGIAAGKSTVSAMMRELGLPVIDADEAARAVMKPGEEAYRDIVAAFGPGILREDGEIDRQKLGAIRFSDEQQLKVLNSIVGPAVLKKMLAEKEAHIRSGAKTVVLDIPLLFESGLQQWVDKVLVVYVDDDVQLRRLMARNGFTEEEALKRIRSQWPSAEKVKRADAVIDNNGNIEETRRQLLDILHQWDLLDKGGSGHHHHHH

SEQ ID NO: 1035 - DNA, 633 bp, synthetic construct
  misc_feature 1..633: note = Variant of 3'O-kinase
  source 1..633: mol_type = other DNA
atggcggttaccattggtttaacaggagggatcgcagcgggcaaatcgactgtgagtgccatgatgcgtgaactgggtctgccggtcatcgatgctgacgaggcagcacgcgccgttatgaagccaggcgaagaagcgtatcgcgacattgtagctgcgttcggtccgggcattcttcgtgaggatggcgagatcgatcgccagaaactgggtgctatccgcttttcggacgaacaacaactgaaggtgctgaattcgattgtaggtcctgcagtcctgaagaagatgctcgctgagaaagaagctcatatccgttcaggcgccaagacggttgtgctggatatcccgctgctgttcgaatccggattgcaatcgtgggtcgacaaagtgctcgtggtgtacgtcgatgatgatgttcagttacgccgccttatggcacgtaacgggtttactgaagaagaagctctgaagcgcattcgttcacagtggcccagtgcggagaaagttaaacgtgcagacgctgtcatcgacaataatggcaatattgaagaaacccgccgccagctgctggacattttacaccagtgggatctgctggacaagggtggctccggccaccatcatcaccatcac

SEQ ID NO: 1036 - protein, 211 aa, synthetic construct
  REGION 1..211: note = Variant of 3'O-kinase
MAVTIGLTGGIAAGKSTVSAMMRELGLPVIDADEAARAVMKPGEEAYRDIVAAFGPGILREDGEIDRQKLGAIRFSDEQQLKVLNSIVGPAVLKKMLAEKEAHIRSGAKTVVLDIPLLFESGLQSWVDKVLVVYVDDDVQLRRLMARNGFTEEEALKRIRSQWPSAEKVKRADAVIDNNGNIEETRRQLLDILHQWDLLDKGGSGHHHHHH

SEQ ID NO: 1037 - DNA, 633 bp, synthetic construct
  misc_feature 1..633: note = Variant of 3'O-kinase
  source 1..633: mol_type = other DNA
atggcgtttaccattggtttaacaggagggatcgcagcgggcaaatcgactgtgagtgccatgatgcgtgaactgggtctgccggtcatcgatgctgacgaggcagcacgcgccgttatgaagccaggcgaagaagcgtatcgccagattgtagctgcgttcggtccgggcattcttcgtgccgatggcgagatcgatcgccagaaactgggtcagatccgcttttcggacgaacaacaacgcaaggtgctgaatgcgattgtaggtcctgaggtcctgaagaagatgaacgctgagaaagaagctcatatccgctcaggcgccaagacggttgtgctggatatcccgctgctgttcgaatccggattgacccattgggtcgacaaagtgctcgtggtgtacgatgatgatgatgttcagttacgccgccttatggcacgtaacgggtttactgaagaagaagctctgaagcgcattcgttcacagtggcccagtgcggagaaagttaaacgtgcagacgctgtcatcgacaataatggcaatattgaagaaacccgccgccagctgctggacattttacaccagtgggatctgctgggtaagggtggctccggccaccatcatcaccatcac

SEQ ID NO: 1038 - protein, 211 aa, synthetic construct
  REGION 1..211: note = Variant of 3'O-kinase
MAFTIGLTGGIAAGKSTVSAMMRELGLPVIDADEAARAVMKPGEEAYRQIVAAFGPGILRADGEIDRQKLGQIRFSDEQQRKVLNAIVGPEVLKKMNAEKEAHIRSGAKTVVLDIPLLFESGLTHWVDKVLVVYDDDDVQLRRLMARNGFTEEEALKRIRSQWPSAEKVKRADAVIDNNGNIEETRRQLLDILHQWDLLGKGGSGHHHHHH

SEQ ID NO: 1039 - DNA, 633 bp, synthetic construct
  misc_feature 1..633: note = Variant of 3'O-kinase
  source 1..633: mol_type = other DNA
atggcgtttaccattggtttaacaggagggatcgcagcgggcaaatcgactgtgagtgccatgatgcgtgaactgggtctgccggtcatcgatgctgacgaggcagcacgcgccgttatgaagccaggcgaagaagcgtatcgccagattgtagctgcgttcggtccgggcattcttcgtgaggatggcgagatcgatcgccagaaactgggtgctatccgcttttcggacgaacaacaacgtaaggtgctgaattcgattgtaggtcctgcagtcctgaagaagatgctcgctgagaaagaagctcatatccgttcaggcgccaagacggttgtgctggatatcccgctgctgttcgaatccggattgagttcgtgggtcgacaaagtgctcgtggtgtacgtcgatgatgatgttcagttacgccgccttatggcacgtaacgggtttactgaagaagaagctctgaagcgcattcgttcacagtggcccagtgaggagaaagttaaaatggcagacgctgtcatcgacaataatggcaatattgaagaaacccgccgccagctgctggacattttacaccagtgggatctgctggacaagggtggctccggccaccatcatcaccatcac

SEQ ID NO: 1040 - protein, 211 aa, synthetic construct
  REGION 1..211: note = Variant of 3'O-kinase
MAFTIGLTGGIAAGKSTVSAMMRELGLPVIDADEAARAVMKPGEEAYRQIVAAFGPGILREDGEIDRQKLGAIRFSDEQQRKVLNSIVGPAVLKKMLAEKEAHIRSGAKTVVLDIPLLFESGLSSWVDKVLVVYVDDDVQLRRLMARNGFTEEEALKRIRSQWPSEEKVKMADAVIDNNGNIEETRRQLLDILHQWDLLDKGGSGHHHHHH

SEQ ID NO: 1041 - DNA, 633 bp, synthetic construct
  misc_feature 1..633: note = Variant of 3'O-kinase
  source 1..633: mol_type = other DNA
atggcggttaccattggtttaacaggagggatcgcagcgggcaaatcgactgtgagtgccatgatgcgtgaactgggtctgccggtcatcgatgctgacgaggcagcacgcgccgttatgaagccaggcgaagaagcgtatcgcgacattgtagctgcgttcggtccgggcattcttcgtgcggatggcgagatcgatcgccagaaactgggtgctatccgcttttcggacgaacaacaacgtaaggtgctgaattcgattgtaggtcctgcagtcctgaagaagatgctcgctgagaaagaagctcatatcaagtcaggcgccaagacggttgtgctggatatcccgctgctgttcgaatccggattgcaatcgtgggtcgacaaagttctcgtggtgtacgtcgatgatgatgttcagttacgccgccttatggcacgtaacgggtttactgaagaagaagctctgaagcgcattcgttcacagtggcccagtgcggagaaagttaaacgtgcagacgctgtcatcgacaataatggcaatattgaagaaacccgccgccagctgctggacattttacaccagtgggatctgctggacaagggtggctccggccaccatcatcaccatcac

SEQ ID NO: 1042 - protein, 211 aa, synthetic construct
  REGION 1..211: note = Variant of 3'O-kinase
MAVTIGLTGGIAAGKSTVSAMMRELGLPVIDADEAARAVMKPGEEAYRDIVAAFGPGILRADGEIDRQKLGAIRFSDEQQRKVLNSIVGPAVLKKMLAEKEAHIKSGAKTVVLDIPLLFESGLQSWVDKVLVVYVDDDVQLRRLMARNGFTEEEALKRIRSQWPSAEKVKRADAVIDNNGNIEETRRQLLDILHQWDLLDKGGSGHHHHHH

SEQ ID NO: 1043 - DNA, 633 bp, synthetic construct
  misc_feature 1..633: note = Variant of 3'O-kinase
  source 1..633: mol_type = other DNA
atggcggttaccattggtttaacaggagggatcgcagcgggcaaatcgactgtgagtgccatgatgcgtgaactgggtctgccggtcatcgatgctgacgaggcagcacgcgccgttatgaagccaggcgaagaagcgtatcgcgacattgtagctgcgttcggtccgggcattcttcgtgcggatggcgagatcgatcgccagaaactgggtgctatccgcttttcggacgaacaacaacgtaaggtgctgaattcgattgtaggtcctgcagtcctgaagaagatgctcgctgagaaagaagctcatatccgctcaggcgccaagacggttgtgctggatatcccgctgctgttcgaatccggattgcaacagtgggtcgacaaagtgctcgtggtgtacgtcgatgatgatgttcagttacgccgccttatggcacgtaacgggtttactgaagaagaagctctgaagcgcattcgttcacagtggcccagtattgagaaagttaaaatggcagacgctgtcatcgacaataatggcaatattgaagaaacccgccgccagctgctggacattttacaccagtgggatctgctggacaagggtggctccggccaccatcatcaccatcac

SEQ ID NO: 1044 - protein, 211 aa, synthetic construct
  REGION 1..211: note = Variant of 3'O-kinase
MAVTIGLTGGIAAGKSTVSAMMRELGLPVIDADEAARAVMKPGEEAYRDIVAAFGPGILRADGEIDRQKLGAIRFSDEQQRKVLNSIVGPAVLKKMLAEKEAHIRSGAKTVVLDIPLLFESGLQQWVDKVLVVYVDDDVQLRRLMARNGFTEEEALKRIRSQWPSIEKVKMADAVIDNNGNIEETRRQLLDILHQWDLLDKGGSGHHHHHH

SEQ ID NO: 1045 - DNA, 633 bp, synthetic construct
  misc_feature 1..633: note = Variant of 3'O-kinase
  source 1..633: mol_type = other DNA
atggcggttaccattggtttaacaggagggatcgcagcgggcaaatcgactgtgagtgccatgatgcgtgaactgggtctgccggtcatcgatgctgacgaggcagcacgcgccgttatgaagccaggcgaagaagcgtatcgccaaattgtagctgcgttcggtccgggcattcttcgtgaggatggcgagatcgatcgccagaaactgggtgctatccgcttttcggacgaacaacaactgaaggtgctgaattcgattgtaggtcctgcagtcctgaagaagatgctcgctgagaaagaagctcatatccgctcaggcgccaagacggttgtgctggatatcccgctgctgttcgaatccggattgacttcgtgggtcgacaaagtgctcgtggtgtacgtcgatgatgatgttcagttacgccgccttatggcacgtaacgggtttactgaagaagaagctctgaagcgcattcgttcacagtggcccagtattgagaaagttaaaatggcagacgctgtcatcgacaataatggcaatattgaagaaacccgccgccagctgctggacattttacaccagtgggatctgctggacaagggtggctccggccaccatcatcaccatcac

SEQ ID NO: 1046 - protein, 211 aa, synthetic construct
  REGION 1..211: note = Variant of 3'O-kinase
MAVTIGLTGGIAAGKSTVSAMMRELGLPVIDADEAARAVMKPGEEAYRQIVAAFGPGILREDGEIDRQKLGAIRFSDEQQLKVLNSIVGPAVLKKMLAEKEAHIRSGAKTVVLDIPLLFESGLTSWVDKVLVVYVDDDVQLRRLMARNGFTEEEALKRIRSQWPSIEKVKMADAVIDNNGNIEETRRQLLDILHQWDLLDKGGSGHHHHHH

SEQ ID NO: 1047 - DNA, 633 bp, synthetic construct
  misc_feature 1..633: note = Variant of 3'O-kinase
  source 1..633: mol_type = other DNA
atggcggttaccattggtttaacaggagggatcgcagcgggcaaatcgactgtgagtgccatgatgcgtgaactgggtctgccggtcatcgatgctgacgaggcagcacgcgccgttatgaagccaggcgaagaagcgtatcgccaaattgtagctgcgttcggtccgggcattcttcgtgaggatggcgagatcgatcgccagaaactgggtgctatccgcttttcggacgaacaacaactgaaggtgctgaattcgattgtaggtcctgcagtcctgaagaagatgctcgctgagaaagaagctcatatcaagtcaggcgccaagacggttgtgctggatatcccgctgctgttcgaatccggattgcaatcgtgggtcgacaaagtgctcgtggtgtacgtcgatgatgatgttcagttacgccgccttatggcacgtaacgggtttactgaagaagaagctctgaagcgcattcgttcacagtggcccagtattgagaaagttaaaatggcagacgctgtcatcgacaataatggcaatattgaagaaacccgccgccagctgctggacattttacaccagtgggatctgctgggcaagggtggctccggccaccatcatcaccatcac

SEQ ID NO: 1048 - protein, 211 aa, synthetic construct
  REGION 1..211: note = Variant of 3'O-kinase
MAVTIGLTGGIAAGKSTVSAMMRELGLPVIDADEAARAVMKPGEEAYRQIVAAFGPGILREDGEIDRQKLGAIRFSDEQQLKVLNSIVGPAVLKKMLAEKEAHIKSGAKTVVLDIPLLFESGLQSWVDKVLVVYVDDDVQLRRLMARNGFTEEEALKRIRSQWPSIEKVKMADAVIDNNGNIEETRRQLLDILHQWDLLGKGGSGHHHHHH

SEQ ID NO: 1049 - DNA, 633 bp, synthetic construct
  misc_feature 1..633: note = Variant of 3'O-kinase
  source 1..633: mol_type = other DNA
atggcgtttaccattggtttaacaggagggatcgcagcgggcaaatcgactgtgagtgccatgatgcgtgaactgggtctgccggtcatcgatgctgacgaggcagcacgcgccgttatgaagccaggcgaagaagcgtatcgccaaattgtagctgcgttcggtccgggcattcttcgtgaggatggcgagatcgatcgccagaaactgggtgctatccgcttttcggacgaacaacaacgcaagatgctgaattcgattgtaggtcctgcagtcctgaagaagatgctcgctgagaaagaagctcatatccgctcaggcgccaagacggttgtgctggatatcccgctgctgttcgaatccggattgcaatcgtgggtcgacaaagtgctcgtggtgtacgtcgatgatgatgttcagttacgccgccttatggcacgtaacgggtttactgaagaagaagctctgaagcgcattcgttcacagtggcccagtgcggagaaagttaaacgcgcagacgctgtcatcgacaataatggcaatattgaagaaacccgccgccagctgctggacattttacaccagtgggatctgctggacaagggtggctccggccaccatcatcaccatcac

SEQ ID NO: 1050 - protein, 211 aa, synthetic construct
  REGION 1..211: note = Variant of 3'O-kinase
MAFTIGLTGGIAAGKSTVSAMMRELGLPVIDADEAARAVMKPGEEAYRQIVAAFGPGILREDGEIDRQKLGAIRFSDEQQRKMLNSIVGPAVLKKMLAEKEAHIRSGAKTVVLDIPLLFESGLQSWVDKVLVVYVDDDVQLRRLMARNGFTEEEALKRIRSQWPSAEKVKRADAVIDNNGNIEETRRQLLDILHQWDLLDKGGSGHHHHHH

SEQ ID NO: 1051 - DNA, 633 bp, synthetic construct
  misc_feature 1..633: note = Variant of 3'O-kinase
  source 1..633: mol_type = other DNA
atggcgtttaccattggtttaacaggagggatcgcagcgggcaaatcgactgtgagtgccatgatgcgtgaactgggtctgccggtcatcgatgctgacgaggcagcacgcgccgttatgaagccaggcgaagaagcgtatcgccaaattgtagctgcgttcggtccgggcattcttcgtgaggatggcgagatcgatcgccagaaactgggtgctatccgcttttcggacgaacaacaactgaaggtgctgaattcgattgtaggtcctgcagtcctgaagaagatgctcgctgagaaagaagctcatatccgttcaggcgccaagacggttgtgctggatatcccgctgctgttcgaatccggattgacttcgtgggtcgacaaagtgctcgtggtgtacgtcgatgatgatgttcagttacgccgccttatggcacgtaacgggtttactgaagaagaagctctgaagcgcattcgttcacagtggcccagtgaggagaaagttaaaatggcagacgctgtcatcgacaataatggcaatattgaagaaacccgccgccagctgctggacattttacaccagtgggatctgctggacaagggtggctccggccaccatcatcaccatcac

SEQ ID NO: 1052 - protein, 211 aa, synthetic construct
  REGION 1..211: note = Variant of 3'O-kinase
MAFTIGLTGGIAAGKSTVSAMMRELGLPVIDADEAARAVMKPGEEAYRQIVAAFGPGILREDGEIDRQKLGAIRFSDEQQLKVLNSIVGPAVLKKMLAEKEAHIRSGAKTVVLDIPLLFESGLTSWVDKVLVVYVDDDVQLRRLMARNGFTEEEALKRIRSQWPSEEKVKMADAVIDNNGNIEETRRQLLDILHQWDLLDKGGSGHHHHHH

SEQ ID NO: 1053 - DNA, 633 bp, synthetic construct
  misc_feature 1..633: note = Variant of 3'O-kinase
  source 1..633: mol_type = other DNA
atggcgtttaccattggtttaacaggagggatcgcagcgggcaaatcgactgtgagtgccatgatgcgtgaactgggtctgccggtcatcgatgctgacgaggcagcacgcgccgttatgaagccaggcgaagaagcgtatcgccagattgtagctgcgttcggtccgggcattcttcgtgccgatggcgagatcgatcgccagaaactgggtgctatccgcttttcggacgaacaacaacgtaaggtgctgaattcgattgtaggtcctgcggtcctggcgaagatgctggctgagaaagaagctcatatccgctcaggcgccaagacggtcgtgctggatatcccgctgctgttcgaatccggattgacccatctggtcgacaaagtgctcgtggtgtacgtcgatgatgatgttcagttacgccgccttatggcacgtaacgggtttactgaagaagaagctctgaagcgcattcgttcacagtggcccagtgcggagaaagttaaacgtgcagacgctgtcatcgacaataatggcaatattgaagaaacccgccgccagctgctggacattttacaccagtgggatctgctgggtaagggtggctccggccaccatcatcaccatcac

SEQ ID NO: 1054 - protein, 211 aa, synthetic construct
  REGION 1..211: note = Variant of 3'O-kinase
MAFTIGLTGGIAAGKSTVSAMMRELGLPVIDADEAARAVMKPGEEAYRQIVAAFGPGILRADGEIDRQKLGAIRFSDEQQRKVLNSIVGPAVLAKMLAEKEAHIRSGAKTVVLDIPLLFESGLTHLVDKVLVVYVDDDVQLRRLMARNGFTEEEALKRIRSQWPSAEKVKRADAVIDNNGNIEETRRQLLDILHQWDLLGKGGSGHHHHHH

SEQ ID NO: 1055 - DNA, 633 bp, synthetic construct
  misc_feature 1..633: note = Variant of 3'O-kinase
  source 1..633: mol_type = other DNA
atggcgtttaccattggtttaacaggagggatcgcagcgggcaaatcgactgtgagtgccatgatgcgtgaactgggtctgccggtcatcgatgctgacgaggcagcacgcgccgttatgaagccaggcgaagaagcgtatcgcgacattgtagctgcgttcggtccgggcattcttcgtgcggatggcgagatcgatcgccagaaactgggtgctatccgcttttcggacgaacaacaacgtaaggtgctgaattcgattgtaggtcctgcagtcctgaagaagatgctcgctgagaaagaagctcatatccgttcaggcgccaagacgattgtgctggatatcccgctgctgttcgaatccggattgcaacactgggtcgacaaagtgctcgtggtgtacgtcgatgatgatgttcagttacgccgccttatggcacgtaacgggtttactgaagaagaagctctgaagcgcattcgttcacagtggcccagtgaggagaaagttaaaatggcagacgctgtcatcgacaataatggcaatattgaagaaacccgccgccagctgctggacattttacaccagtgggatctgctggacaagggtggctccggccaccatcatcaccatcac

SEQ ID NO: 1056 - protein, 211 aa, synthetic construct
  REGION 1..211: note = Variant of 3'O-kinase
MAFTIGLTGGIAAGKSTVSAMMRELGLPVIDADEAARAVMKPGEEAYRDIVAAFGPGILRADGEIDRQKLGAIRFSDEQQRKVLNSIVGPAVLKKMLAEKEAHIRSGAKTIVLDIPLLFESGLQHWVDKVLVVYVDDDVQLRRLMARNGFTEEEALKRIRSQWPSEEKVKMADAVIDNNGNIEETRRQLLDILHQWDLLDKGGSGHHHHHH

SEQ ID NO: 1057 - DNA, 633 bp, synthetic construct
  misc_feature 1..633: note = Variant of 3'O-kinase
  source 1..633: mol_type = other DNA
atggcgtttaccattggtttaacaggagggatcgcagcgggcaaatcgactgtgagtgccatgatgcgtgaactgggtctgccggtcatcgatgctgacgaggcagcacgcgccgttatgaagccaggcgaagaagcgtatcgcgacattgtagctgcgttcggtccgggcattcttcgtgaggatggcgagatcgatcgccagaaactgggtgctatccgcttttcggacgaacaacaacgtaaggtgctgaattcgattgtaggtcctgcagtcctgaagaagatgctcgctgagaaagaagctcatatccgctcaggcgccaagacggttgtgctggatatcccgctgctgttcgaatccggattgcaatcgtgggtcgacaaagtgctcgtggtgtacgtcgatgatgatgttcagttacgccgccttatggcacgtaacgggtttactgaagaagaagctctgaagcgcattcgttcacagtggcccagtattgagaaagttaaaatggcagacgctgtcatcgacaataatggcaatattgaagaaacccgccgccagctgctggacattttacaccagtgggatctgctgggtaagggtggctccggccaccatcatcaccatcac

SEQ ID NO: 1058 - protein, 211 aa, synthetic construct
  REGION 1..211: note = Variant of 3'O-kinase
MAFTIGLTGGIAAGKSTVSAMMRELGLPVIDADEAARAVMKPGEEAYRDIVAAFGPGILREDGEIDRQKLGAIRFSDEQQRKVLNSIVGPAVLKKMLAEKEAHIRSGAKTVVLDIPLLFESGLQSWVDKVLVVYVDDDVQLRRLMARNGFTEEEALKRIRSQWPSIEKVKMADAVIDNNGNIEETRRQLLDILHQWDLLGKGGSGHHHHHH

SEQ ID NO: 1059 - DNA, 633 bp, synthetic construct
  misc_feature 1..633: note = Variant of 3'O-kinase
  source 1..633: mol_type = other DNA
atggcggttaccattggtttaacaggagggatcgcagcgggcaaatcgactgtgagtgccatgatgcgtgaactgggtctgccggtcatcgatgctgacgaggcagcacgcgccgttatgaagccaggcgaagaagcgtatcgcgacattgtagctgcgttcggtccgggcattcttcgtgaggatggcgagatcgatcgccagaaactgggtgctatccgcttttcggacgaacaacaacgcaagatgctgaattcgattgtaggtcctgcagtcctgaagaagatgctcgctgagaaagaagctcatatccgctcaggcgccaagacggttgtgctggatatcccgctgctgttcgaatccggattgacccattgggtcgacaaagtgctcgtggtgtacgtcgatgatgatgttcagttacgccgccttatggcacgtaacgggtttactgaagaagaagctctgaagcgcattcgttcacagtggcccagtgcggagaaagttaaacgtgcagacgctgtcatcgacaataatggcaatattgaagaaacccgccgccagctgctggacattttacaccagtgggatctgctggacaagggtggctccggccaccatcatcaccatcac

SEQ ID NO: 1060 - protein, 211 aa, synthetic construct
  REGION 1..211: note = Variant of 3'O-kinase
MAVTIGLTGGIAAGKSTVSAMMRELGLPVIDADEAARAVMKPGEEAYRDIVAAFGPGILREDGEIDRQKLGAIRFSDEQQRKMLNSIVGPAVLKKMLAEKEAHIRSGAKTVVLDIPLLFESGLTHWVDKVLVVYVDDDVQLRRLMARNGFTEEEALKRIRSQWPSAEKVKRADAVIDNNGNIEETRRQLLDILHQWDLLDKGGSGHHHHHH

SEQ ID NO: 1061 - DNA, 633 bp, synthetic construct
  misc_feature 1..633: note = Variant of 3'O-kinase
  source 1..633: mol_type = other DNA
atggcgtttaccattggtttaacaggagggatcgcagcgggcaaatcgactgtgagtgccatgatgcgtgaactgggtctgccggtcatcgatgctgacgaggcagcacgcgccgttatgaagccaggcgaagaagcgtatcgccagattgtagctgcgttcggtccgggcattcttcgcgccgatggcgagatcgatcgccagaaactgggtgctatccgcttttcggacgaacaacaacgcaaggtgctgaatgcgattgtaggtcctgcggtcctggcgaagatgctggctgagaaagaagctcacatccgctcaggcgccaagacgatcgtgctggatatcccgctgctgttcgaatccggattgacccatctggtcgacaaagtgctcgtggtgtacgttgatgatgatgttcagttaaagcgccttatggcacgtaacgggtttactgaagaagaagctctgaagcgcattcgttcacagtggcccagtgcggagaaagttaaacgtgcagacgctgtcatcgacaataatggcaatattgaagaaacccgccgccagctgctggacattttacaccagtgggatctgctgggtaagggtggctccggccaccatcatcaccatcac

SEQ ID NO: 1062 - protein, 211 aa, synthetic construct
  REGION 1..211: note = Variant of 3'O-kinase
MAFTIGLTGGIAAGKSTVSAMMRELGLPVIDADEAARAVMKPGEEAYRQIVAAFGPGILRADGEIDRQKLGAIRFSDEQQRKVLNAIVGPAVLAKMLAEKEAHIRSGAKTIVLDIPLLFESGLTHLVDKVLVVYVDDDVQLKRLMARNGFTEEEALKRIRSQWPSAEKVKRADAVIDNNGNIEETRRQLLDILHQWDLLGKGGSGHHHHHH

SEQ ID NO: 1063 - DNA, 633 bp, synthetic construct
  misc_feature 1..633: note = Variant of 3'O-kinase
  source 1..633: mol_type = other DNA
atggcgtttaccattggtttaacaggagggatcgcagcgggcaaatcgactgtgagtgccatgatgcgtgaactgggtctgccggtcatcgatgctgacgaggcagcacgcgccgttatgaagccaggcgaagaagcgtatcgccagattgtagctgcgttcggtccgggcattcttcgtgaggatggcgagatcgatcgccagaaactgggtgctatccgcttttcggacgaacaacaacgtaaggtgctgaattcgattgtaggtcctgcagtcctgaagaagatgctcgctgagaaagaagctcatatccgctcaggcgccaagacggttgtgctggatatcccgctgctgttcgaatccggattgacccattgggtcgacaaagtgctcgtggtgtacgtcgatgatgatgttcagttacgccgccttatggcacgtaacgggtttactgaagaagaagctctgaagcgcattcgttcacagtggcccagtgcggagaaagttaaacgcgcagacgctgtcatcgacaataatggcaatattgaagaaacccgccgccagctgctggacattttacaccagtgggatctgctggacaagggtggctccggccaccatcatcaccatcac

SEQ ID NO: 1064 - protein, 211 aa, synthetic construct
  REGION 1..211: note = Variant of 3'O-kinase
MAFTIGLTGGIAAGKSTVSAMMRELGLPVIDADEAARAVMKPGEEAYRQIVAAFGPGILREDGEIDRQKLGAIRFSDEQQRKVLNSIVGPAVLKKMLAEKEAHIRSGAKTVVLDIPLLFESGLTHWVDKVLVVYVDDDVQLRRLMARNGFTEEEALKRIRSQWPSAEKVKRADAVIDNNGNIEETRRQLLDILHQWDLLDKGGSGHHHHHH

SEQ ID NO: 1065 - DNA, 633 bp, synthetic construct
  misc_feature 1..633: note = Variant of 3'O-kinase
  source 1..633: mol_type = other DNA
atggcggttaccattggtttaacaggagggatcgcagcgggcaaatcgactgtgagtgccatgatgcgtgaactgggtctgccggtcatcgatgctgacgaggcagcacgcgccgttatgaagccaggcgaagaagcgtatcgccaaattgtagctgcgttcggtccgggcattcttcgtgcggatggcgagatcgatcgccagaaactgggtgctatccgcttttcggacgaacaacaactgaaggtgctgaattcgattgtaggtcctgcagtcctgaagaagatgctcgctgagaaagaagctcatatccgttcaggcgccaagacggttgtgctggatatcccgctgctgttcgaatccggattgagttcgtgggtcgacaaagtgctcgtggtgtacgtcgatgatgatgttcagttacgccgccttatggcacgtaacgggtttactgaagaagaagctctgaagcgcattcgttcacagtggcccagtgcggagaaagttaaacgcgcagacgctgtcatcgacaataatggcaatattgaagaaacccgccgccagctgctggacattttacaccagtgggatctgctggacaagggtggctccggccaccatcatcaccatcac

SEQ ID NO: 1066 - protein, 211 aa, synthetic construct
  REGION 1..211: note = Variant of 3'O-kinase
MAVTIGLTGGIAAGKSTVSAMMRELGLPVIDADEAARAVMKPGEEAYRQIVAAFGPGILRADGEIDRQKLGAIRFSDEQQLKVLNSIVGPAVLKKMLAEKEAHIRSGAKTVVLDIPLLFESGLSSWVDKVLVVYVDDDVQLRRLMARNGFTEEEALKRIRSQWPSAEKVKRADAVIDNNGNIEETRRQLLDILHQWDLLDKGGSGHHHHHH

SEQ ID NO: 1067 - DNA, 633 bp, synthetic construct
  misc_feature 1..633: note = Variant of 3'O-kinase
  source 1..633: mol_type = other DNA
atggcgtttaccattggtttaacaggagggatcgcagcgggcaaatcgactgtgagtgccatgatgcgtgaactgggtctgccggtcatcgatgctgacgaggcagcacgcgccgttatgaagccaggcgaagaagcgtatcgcgacattgtagctgcgttcggtccgggcattcttcgtgaggatggcgagatcgatcgccagaaactgggtgctatccgcttttcggacgaacaacaacgcaagatgctgaattcgattgtaggtcctgcagtcctgaagaagatgctcgctgagaaagaagctcatatcaagtcaggcgccaagacggttgtgctggatatcccgctgctgttcgaatccggattgagttcgtgggtcgacaaagtgctcgtggtgtacgtcgatgatgatgttcagttacgccgccttatggcacgtaacgggtttactgaagaagaagctctgaagcgcattcgttcacagtggcccagtgcggagaaagttaaaatggcagacgctgtcatcgacaataatggcaatattgaagaaacccgccgccagctgctggacattttacaccagtgggatctgctgggtaagggtggctccggccaccatcatcaccatcac

SEQ ID NO: 1068 - protein, 211 aa, synthetic construct
  REGION 1..211: note = Variant of 3'O-kinase
MAFTIGLTGGIAAGKSTVSAMMRELGLPVIDADEAARAVMKPGEEAYRDIVAAFGPGILREDGEIDRQKLGAIRFSDEQQRKMLNSIVGPAVLKKMLAEKEAHIKSGAKTVVLDIPLLFESGLSSWVDKVLVVYVDDDVQLRRLMARNGFTEEEALKRIRSQWPSAEKVKMADAVIDNNGNIEETRRQLLDILHQWDLLGKGGSGHHHHHH

SEQ ID NO: 1069 - DNA, 633 bp, synthetic construct
  misc_feature 1..633: note = Variant of 3'O-kinase
  source 1..633: mol_type = other DNA
atggcgtttaccattggtttaacaggagggatcgcagcgggcaaatcgactgtgagtgccatgatgcgtgaactgggtctgccggtcatcgatgctgacgaggcagcacgcgccgttatgaagccaggcgaagaagcgtatcgccaaattgtagctgcgttcggtccgggcattcttcgtgaggatggcgagatcgatcgccagaaactgggtgctatccgcttttcggacgaacaacaactgaagatgctgaattcgattgtaggtcctgcagtcctgaagaagatgctcgctgagaaagaagctcatatccgttcaggcgccaagacggttgtgctggatatcccgctgctgttcgaatccggattgactcactgggtcgacaaagtgctcgtggtgtacgtcgatgatgatgttcagttacgccgccttatggcacgtaacgggtttactgaagaagaagctctgaagcgcattcgttcacagtggcccagtattgagaaagttaaaatggcagacgctgtcatcgacaataatggcaatattgaagaaacccgccgccagctgctggacattttacaccagtgggatctgctggacaagggtggctccggccaccatcatcaccatcac

SEQ ID NO: 1070 - protein, 211 aa, synthetic construct
  REGION 1..211: note = Variant of 3'O-kinase
MAFTIGLTGGIAAGKSTVSAMMRELGLPVIDADEAARAVMKPGEEAYRQIVAAFGPGILREDGEIDRQKLGAIRFSDEQQLKMLNSIVGPAVLKKMLAEKEAHIRSGAKTVVLDIPLLFESGLTHWVDKVLVVYVDDDVQLRRLMARNGFTEEEALKRIRSQWPSIEKVKMADAVIDNNGNIEETRRQLLDILHQWDLLDKGGSGHHHHHH

SEQ ID NO: 1071 - DNA, 633 bp, synthetic construct
  misc_feature 1..633: note = Variant of 3'O-kinase
  source 1..633: mol_type = other DNA
atggcggttaccattggtttaacaggagggatcgcagcgggcaaatcgactgtgagtgccatgatgcgtgaactgggtctgccggtcatcgatgctgacgaggcagcacgcgccgttatgaagccaggcgaagaagcgtatcgcgacattgtagctgcgttcggtccgggcattcttcgtgccgatggcgagatcgatcgccagaaactgggtgctatccgcttttcggacgaacaacaactgaaggtgctgaattcgattgtaggtcctgcagtcctgaagaagatgctcgctgagaaagaagctcatatccgctcaggcgccaagacggttgtgctggatatcccgctgctgttcgaatccggattgcaacagtgggtcgacaaagtgctcgtggtgtacgtcgatgatgatgttcagttacgccgccttatggcacgtaacgggtttactgaagaagaagctctgaagcgcattcgttcacagtggcccagtgaggagaaagttaaaatggcagacgctgtcatcgacaataatggcaatattgaagaaacccgccgccagctgctggacattttacaccagtgggatctgctgggtaagggtggctccggccaccatcatcaccatcac

SEQ ID NO: 1072 - protein, 211 aa, synthetic construct
  REGION 1..211: note = Variant of 3'O-kinase
MAVTIGLTGGIAAGKSTVSAMMRELGLPVIDADEAARAVMKPGEEAYRDIVAAFGPGILRADGEIDRQKLGAIRFSDEQQLKVLNSIVGPAVLKKMLAEKEAHIRSGAKTVVLDIPLLFESGLQQWVDKVLVVYVDDDVQLRRLMARNGFTEEEALKRIRSQWPSEEKVKMADAVIDNNGNIEETRRQLLDILHQWDLLGKGGSGHHHHHH

SEQ ID NO: 1073 - DNA, 633 bp, synthetic construct
  misc_feature 1..633: note = Variant of 3'O-kinase
  source 1..633: mol_type = other DNA
atggcggttaccattggtttaacaggagggatcgcagcgggcaaatcgactgtgagtgccatgatgcgtgaactgggtctgccggtcatcgatgctgacgaggcagcacgcgccgttatgaagccaggcgaagaagcgtatcgcgacattgtagctgcgttcggtccgggcattcttcgtgaggatggcgagatcgatcgccagaaactgggtgctatccgcttttcggacgaacaacaacgcaagatgctgaattcgattgtaggtcctgcagtcctgaagaagatgctcgctgagaaagaagctcatatccgttcaggcgccaagacggttgtgctggatatcccgctgctgttcgaatccggattgacttcgtgggtcgacaaagtgctcgtggtgtacgtcgatgatgatgttcagttacgccgccttatggcacgtaacgggtttactgaagaagaagctctgaagcgcattcgttcacagtggcccagtgaggagaaagttaaacgcgcagacgctgtcatcgacaataatggcaatattgaagaaacccgccgccagctgctggacattttacaccagtgggatctgctgggcaagggtggctccggccaccatcatcaccatcac

SEQ ID NO: 1074 - protein, 211 aa, synthetic construct
  REGION 1..211: note = Variant of 3'O-kinase
MAVTIGLTGGIAAGKSTVSAMMRELGLPVIDADEAARAVMKPGEEAYRDIVAAFGPGILREDGEIDRQKLGAIRFSDEQQRKMLNSIVGPAVLKKMLAEKEAHIRSGAKTVVLDIPLLFESGLTSWVDKVLVVYVDDDVQLRRLMARNGFTEEEALKRIRSQWPSEEKVKRADAVIDNNGNIEETRRQLLDILHQWDLLGKGGSGHHHHHH

SEQ ID NO: 1075 - DNA, 633 bp, synthetic construct
  misc_feature 1..633: note = Variant of 3'O-kinase
  source 1..633: mol_type = other DNA
atggcgtttaccattggtttaacaggagggatcgcagcgggcaaatcgactgtgagtgccatgatgcgtgaactgggtctgccggtcatcgatgctgacgaggcagcacgcgccgttatgaagccaggcgaagaagcgtatcgccaaattgtagctgcgttcggtccgggcattcttcgtgaggatggcgagatcgatcgccagaaactgggtgctatccgcttttcggacgaacaacaacgtaaggtgctgaattcgattgtaggtcctgcagtcctgaagaagatgctcgctgagaaagaagctcatatccgttcaggcgccaagacggttgtgctggatatcccgctgctgttcgaatccggattgactcagtgggtcgacaaagtgctcgtggtgtacgtcgatgatgatgttcagttacgccgccttatggcacgtaacgggtttactgaagaagaagctctgaagcgcattcgttcacagtggcccagtgcggagaaagttaaacgcgcagacgctgtcatcgacaataatggcaatattgaagaaacccgccgccagctgctggacattttacaccagtgggatctgctgggtaagggtggctccggccaccatcatcaccatcac

SEQ ID NO: 1076 - protein, 211 aa, synthetic construct
  REGION 1..211: note = Variant of 3'O-kinase
MAFTIGLTGGIAAGKSTVSAMMRELGLPVIDADEAARAVMKPGEEAYRQIVAAFGPGILREDGEIDRQKLGAIRFSDEQQRKVLNSIVGPAVLKKMLAEKEAHIRSGAKTVVLDIPLLFESGLTQWVDKVLVVYVDDDVQLRRLMARNGFTEEEALKRIRSQWPSAEKVKRADAVIDNNGNIEETRRQLLDILHQWDLLGKGGSGHHHHHH

SEQ ID NO: 1077 - DNA, 633 bp, synthetic construct
  misc_feature 1..633: note = Variant of 3'O-kinase
  source 1..633: mol_type = other DNA
atggcggttaccattggtttaacaggagggatcgcagcgggcaaatcgactgtgagtgccatgatgcgtgaactgggtctgccggtcatcgatgctgacgaggcagcacgcgccgttatgaagccaggcgaagaagcgtatcgccaaattgtagctgcgttcggtccgggcattcttcgtgccgatggcgagatcgatcgccagaaactgggtgctatccgcttttcggacgaacaacaacgtaaggtgctgaattcgattgtaggtcctgcagtcctgaagaagatgctcgctgagaaagaagctcatatccgttcaggcgccaagacggttgtgctggatatcccgctgctgttcgaatccggattgacccattgggtcgacaaagtgctcgtggtgtacgtcgatgatgatgttcagttacgccgccttatggcacgtaacgggtttactgaagaagaagctctgaagcgcattcgttcacagtggcccagtgaggagaaagttaaaatggcagacgctgtcatcgacaataatggcaatattgaagaaacccgccgccagctgctggacattttacaccagtgggatctgctgggtaagggtggctccggccaccatcatcaccatcac

SEQ ID NO: 1078 - protein, 211 aa, synthetic construct
  REGION 1..211: note = Variant of 3'O-kinase
MAVTIGLTGGIAAGKSTVSAMMRELGLPVIDADEAARAVMKPGEEAYRQIVAAFGPGILRADGEIDRQKLGAIRFSDEQQRKVLNSIVGPAVLKKMLAEKEAHIRSGAKTVVLDIPLLFESGLTHWVDKVLVVYVDDDVQLRRLMARNGFTEEEALKRIRSQWPSEEKVKMADAVIDNNGNIEETRRQLLDILHQWDLLGKGGSGHHHHHH

SEQ ID NO: 1079 - DNA, 633 bp, synthetic construct
  misc_feature 1..633: note = Variant of 3'O-kinase
  source 1..633: mol_type = other DNA
atggcgtttaccattggtttaacaggagggatcgcagcgggcaaatcgactgtgagtgccatgatgcgtgaactgggtctgccggtcatcgatgctgacgaggcagcacgcgccgttatgaagccaggcgaagaagcgtatcgcgacattgtagctgcgttcggtccgggcattcttcgtgaggatggcgagatcgatcgccagaaactgggtgctatccgcttttcggacgaacaacaacgcaaggtgctgaattcgattgtaggtcctgcagtcctgaagaagatgctcgctgagaaagaagctcatatccgctcaggcgccaagacggttgtgctggatatcccgctgctgttcgaatccggattgacttcgtgggtcgacaaagtgctcgtggtgtacgtcgatgatgatgttcagttacgccgccttatggcacgtaacgggtttactgaagaagaagctctgaagcgcattcgttcacagtggcccagtgcggagaaagttaaaatggcagacgctgtcatcgacaataatggcaatattgaagaaacccgccgccagctgctggacattttacaccagtgggatctgctgggtaagggtggctccggccaccatcatcaccatcac

SEQ ID NO: 1080 - protein, 211 aa, synthetic construct
  REGION 1..211: note = Variant of 3'O-kinase
MAFTIGLTGGIAAGKSTVSAMMRELGLPVIDADEAARAVMKPGEEAYRDIVAAFGPGILREDGEIDRQKLGAIRFSDEQQRKVLNSIVGPAVLKKMLAEKEAHIRSGAKTVVLDIPLLFESGLTSWVDKVLVVYVDDDVQLRRLMARNGFTEEEALKRIRSQWPSAEKVKMADAVIDNNGNIEETRRQLLDILHQWDLLGKGGSGHHHHHH

SEQ ID NO: 1081 - DNA, 633 bp, synthetic construct
  misc_feature 1..633: note = Variant of 3'O-kinase
  source 1..633: mol_type = other DNA
atggcgtttaccattggtttaacaggagggatcgcagcgggcaaatcgactgtgagtgccatgatgcgtgaactgggtctgccggtcatcgatgctgacgaggcagcacgcgccgttatgaagccaggcgaagaagcgtatcgccagattgtagctgcgttcggtccgggcattcttcgcgccgatggcgagatcgatcgccagaaactgggtgctatccgcttttcggacgaacaacaacgtgaaatgctgaattcgattgtaggtcctgcagtcctgaagaagatgctcgctgagaaagaagctcatatccgctcaggcgccaagacggttgtgctggatatcccgctgctgttcgaatccggattgacccattgggtcgacaaagtgctcgtggtgtacgtcgatgatgatgttcagttacgccgccttatggcacgtaacgggtttactgaagaagaagctctgaagcgcattcgttcacagtggcccagtgcggagaaagttaaacgtgcagacgctgtcatcgacaataatggcaatattgaagaaacccgccgccagctgctggacattttacaccagtgggatctgctgggtaagggtggctccggccaccatcatcaccatcac

SEQ ID NO: 1082 - protein, 211 aa, synthetic construct
  REGION 1..211: note = Variant of 3'O-kinase
MAFTIGLTGGIAAGKSTVSAMMRELGLPVIDADEAARAVMKPGEEAYRQIVAAFGPGILRADGEIDRQKLGAIRFSDEQQREMLNSIVGPAVLKKMLAEKEAHIRSGAKTVVLDIPLLFESGLTHWVDKVLVVYVDDDVQLRRLMARNGFTEEEALKRIRSQWPSAEKVKRADAVIDNNGNIEETRRQLLDILHQWDLLGKGGSGHHHHHH

SEQ ID NO: 1083 - DNA, 633 bp, synthetic construct
  misc_feature 1..633: note = Variant of 3'O-kinase
  source 1..633: mol_type = other DNA
atggcggttaccattggtttaacaggagggatcgcagcgggcaaatcgactgtgagtgccatgatgcgtgaactgggtctgccggtcatcgatgctgacgaggcagcacgcgccgttatgaagccaggcgaagaagcgtatcgccagattgtagctgcgttcggtccgggcattcttcgtgccgatggcgagatcgatcgccagaaactgggtgctatccgcttttcggacgaacaacaactgaaggtgctgaattcgattgtaggtcctgcagtcctgaagaagatgctcgctgagaaagaagctcatatcaagtcaggcgccaagacggttgtgctggatatcccgctgctgttcgaatccggattgcaacactgggtcgacaaagtgctcgtggtgtacgtcgatgatgatgttcagttacgccgccttatggcacgtaacgggtttactgaagaagaagctctgaagcgcattcgttcacagtggcccagtattgagaaagttaaacgcgcagacgctgtcatcgacaataatggcaatattgaagaaacccgccgccagctgctggacattttacaccagtgggatctgctgggcaagggtggctccggccaccatcatcaccatcac

SEQ ID NO: 1084 - protein, 211 aa, synthetic construct
  REGION 1..211: note = Variant of 3'O-kinase
MAVTIGLTGGIAAGKSTVSAMMRELGLPVIDADEAARAVMKPGEEAYRQIVAAFGPGILRADGEIDRQKLGAIRFSDEQQLKVLNSIVGPAVLKKMLAEKEAHIKSGAKTVVLDIPLLFESGLQHWVDKVLVVYVDDDVQLRRLMARNGFTEEEALKRIRSQWPSIEKVKRADAVIDNNGNIEETRRQLLDILHQWDLLGKGGSGHHHHHH

SEQ ID NO: 1085 - DNA, 633 bp, synthetic construct
  misc_feature 1..633: note = Variant of 3'O-kinase
  source 1..633: mol_type = other DNA
atggcgtttaccattggtttaacaggagggatcgcagcgggcaaatcgactgtgagtgccatgatgcgtgaactgggtctgccggtcatcgatgctgacgaggcagcacgcgccgttatgaagccaggcgaagaagcgtatcgccaaattgtagctgcgttcggtccgggcattcttcgtgaggatggcgagatcgatcgccagaaactgggtgctatccgcttttcggacgaacaacaacgcaaggtgctgaattcgattgtaggtcctgcagtcctgaagaagatgctcgctgagaaagaagctcatatccgctcaggcgccaagacggttgtgctggatatcccgctgctgttcgaatccggattgacccattgggtcgacaaagtgctcgtggtgtacgtcgatgatgatgttcagttacgccgccttatggcacgtaacgggtttactgaagaagaagctctgaagcgcattcgttcacagtggcccagtgaggagaaagttaaacgcgcagacgctgtcatcgacaataatggcaatattgaagaaacccgccgccagctgctggacattttacaccagtgggatctgctgggcaagggtggctccggccaccatcatcaccatcac

SEQ ID NO: 1086 - protein, 211 aa, synthetic construct
  REGION 1..211: note = Variant of 3'O-kinase
MAFTIGLTGGIAAGKSTVSAMMRELGLPVIDADEAARAVMKPGEEAYRQIVAAFGPGILREDGEIDRQKLGAIRFSDEQQRKVLNSIVGPAVLKKMLAEKEAHIRSGAKTVVLDIPLLFESGLTHWVDKVLVVYVDDDVQLRRLMARNGFTEEEALKRIRSQWPSEEKVKRADAVIDNNGNIEETRRQLLDILHQWDLLGKGGSGHHHHHH

SEQ ID NO: 1087 - DNA, 633 bp, synthetic construct
  misc_feature 1..633: note = Variant of 3'O-kinase
  source 1..633: mol_type = other DNA
atggcgtttaccattggtttaacaggagggatcgcagcgggcaaatcgactgtgagtgccatgatgcgtgaactgggtctgccggtcatcgatgctgacgaggcagcacgcgccgttatgaagccaggcgaagaagcgtatcgccaaattgtagctgcgttcggtccgggcattcttcgtgcggatggcgagatcgatcgccagaaactgggtgctatccgcttttcggacgaacaacaacgcaagatgctgaattcgattgtaggtcctgcagtcctgaagaagatgctcgctgagaaagaagctcatatcaagtcaggcgccaagacggttgtgctggatatcccgctgctgttcgaatccggattgagttcgtgggtcgacaaagtgctcgtggtgtacgtcgatgatgatgttcagttacgccgccttatggcacgtaacgggtttactgaagaagaagctctgaagcgcattcgttcacagtggcccagtattgagaaagttaaacgcgcagacgctgtcatcgacaataatggcaatattgaagaaacccgccgccagctgctggacattttacaccagtgggatctgctggacaagggtggctccggccaccatcatcaccatcac

SEQ ID NO: 1088 - protein, 211 aa, synthetic construct
  REGION 1..211: note = Variant of 3'O-kinase
MAFTIGLTGGIAAGKSTVSAMMRELGLPVIDADEAARAVMKPGEEAYRQIVAAFGPGILRADGEIDRQKLGAIRFSDEQQRKMLNSIVGPAVLKKMLAEKEAHIKSGAKTVVLDIPLLFESGLSSWVDKVLVVYVDDDVQLRRLMARNGFTEEEALKRIRSQWPSIEKVKRADAVIDNNGNIEETRRQLLDILHQWDLLDKGGSGHHHHHH

SEQ ID NO: 1089 - DNA, 633 bp, synthetic construct
  misc_feature 1..633: note = Variant of 3'O-kinase
  source 1..633: mol_type = other DNA
atggcggttaccattggtttaacaggagggatcgcagcgggcaaatcgactgtgagtgccatgatgcgtgaactgggtctgccggtcatcgatgctgacgaggcagcacgcgccgttatgaagccaggcgaagaagcgtatcgcgacattgtagctgcgttcggtccgggcattcttcgtgaggatggcgagatcgatcgccagaaactgggtgctatccgcttttcggacgaacaacaactgaagatgctgaattcgattgtaggtcctgcagtcctgaagaagatgctcgctgagaaagaagctcatatccgctcaggcgccaagacggttgtgctggatatcccgctgctgttcgaatccggattgagttcgtgggtcgacaaagtgctcgtggtgtacgtcgatgatgatgttcagttacgccgccttatggcacgtaacgggtttactgaagaagaagctctgaagcgcattcgttcacagtggcccagtattgagaaagttaaaatggcagacgctgtcatcgacaataatggcaatattgaagaaacccgccgccagctgctggacattttacaccagtgggatctgctgggtaagggtggctccggccaccatcatcaccatcac

SEQ ID NO: 1090 - protein, 211 aa, synthetic construct
  REGION 1..211: note = Variant of 3'O-kinase
MAVTIGLTGGIAAGKSTVSAMMRELGLPVIDADEAARAVMKPGEEAYRDIVAAFGPGILREDGEIDRQKLGAIRFSDEQQLKMLNSIVGPAVLKKMLAEKEAHIRSGAKTVVLDIPLLFESGLSSWVDKVLVVYVDDDVQLRRLMARNGFTEEEALKRIRSQWPSIEKVKMADAVIDNNGNIEETRRQLLDILHQWDLLGKGGSGHHHHHH

SEQ ID NO: 1091 - DNA, 633 bp, synthetic construct
  misc_feature 1..633: note = Variant of 3'O-kinase
  source 1..633: mol_type = other DNA
atggcgtttaccattggtttaacaggagggatcgcagcgggcaaatcgactgtgagtgccatgatgcgtgaactgggtctgccggtcatcgatgctgacgaggcagcacgcgccgttatgaagccaggcgaagaagcgtatcgcgacattgtagctgcgttcggtccgggcattcttcgtgaggatggcgagatcgatcgccagaaactgggtgctatccgcttttcggacgaacaacaacgcaagatgctgaattcgattgtaggtcctgcagtcctgaagaagatgctcgctgagaaagaagctcatatccgctcaggcgccaagacggttgtgctggatatcccgctgctgttcgaatccggattgagttcgtgggtcgacaaagtgctcgtggtgtacgtcgatgatgatgttcagttacgccgccttatggcacgtaacgggtttactgaagaagaagctctgaagcgcattcgttcacagtggcccagtgcggagaaagttaaaatggcagacgctgtcatcgacaataatggcaatattgaagaaacccgccgccagctgctggacattttacaccagtgggatctgctgggcaagggtggctccggccaccatcatcaccatcac

SEQ ID NO: 1092 - protein, 211 aa, synthetic construct
  REGION 1..211: note = Variant of 3'O-kinase
MAFTIGLTGGIAAGKSTVSAMMRELGLPVIDADEAARAVMKPGEEAYRDIVAAFGPGILREDGEIDRQKLGAIRFSDEQQRKMLNSIVGPAVLKKMLAEKEAHIRSGAKTVVLDIPLLFESGLSSWVDKVLVVYVDDDVQLRRLMARNGFTEEEALKRIRSQWPSAEKVKMADAVIDNNGNIEETRRQLLDILHQWDLLGKGGSGHHHHHH

SEQ ID NO: 1093 - DNA, 633 bp, synthetic construct
  misc_feature 1..633: note = Variant of 3'O-kinase
  source 1..633: mol_type = other DNA
atggcgtttaccattggtttaacaggagggatcgcagcgggcaaatcgactgtgagtgccatgatgcgtgaactgggtctgccggtcatcgatgctgacgaggcagcacgcgccgttatgaagccaggcgaagaagcgtatcgccagattgtagctgcgttcggtccgggcattcttcgcgccgatggcgagatcgatcgccagaaactgggtcagatccgcttttcggacgaacaacaacgtaaggtgctgaattcgattgtaggtcctgcagtcctgaagaagatgctcgctgagaaagaagctcatatccgctcaggcgccaagacggttgtgctggatatcccgctgctgttcgaatccggattgacccattgggtcgacaaagtgctcgtggtgtacgtcgatgatgatgttcagttaaagcgccttatggcacgtaacgggtttactgaagaagaagctctgaagcgcattcgttcacagtggcccagtgcggagaaagttaaacgtgcagacgctgtgatcgacaataatggcaatgaagaagaaacccgccgccagctgctggacattttacaccagtgggatctgctgggtaagggtggctccggccaccatcatcaccatcac

SEQ ID NO: 1094 - protein, 211 aa, synthetic construct
  REGION 1..211: note = Variant of 3'O-kinase
MAFTIGLTGGIAAGKSTVSAMMRELGLPVIDADEAARAVMKPGEEAYRQIVAAFGPGILRADGEIDRQKLGQIRFSDEQQRKVLNSIVGPAVLKKMLAEKEAHIRSGAKTVVLDIPLLFESGLTHWVDKVLVVYVDDDVQLKRLMARNGFTEEEALKRIRSQWPSAEKVKRADAVIDNNGNEEETRRQLLDILHQWDLLGKGGSGHHHHHH

SEQ ID NO: 1095 - DNA, 633 bp, synthetic construct
  misc_feature 1..633: note = Variant of 3'O-kinase
  source 1..633: mol_type = other DNA
atggcgtttaccattggtttaacaggagggatcgcagcgggcaaatcgactgtgagtgccatgatgcgtgaactgggtctgccggtcatcgatgctgacgaggcagcacgcgccgttatgaagccaggcgaagaagcgtatcgcgacattgtagctgcgttcggtccgggcattcttcgtgcggatggcgagatcgatcgccagaaactgggtgctatccgcttttcggacgaacaacaacgcaaggtgctgaattcgattgtaggtcctgcagtcctgaagaagatgctcgctgagaaagaagctcatatccgctcaggcgccaagacggttgtgctggatatcccgctgctgttcgaatccggattgcaacagtgggtcgacaaagtgctcgtggtgtacgtcgatgatgatgttcagttacgccgccttatggcacgtaacgggtttactgaagaagaagctctgaagcgcattcgttcacagtggcccagtattgagaaagttaaacgcgcagacgctgtcatcgacaataatggcaatattgaagaaacccgccgccagctgctggacattttacaccagtgggatctgctgggtaagggtggctccggccaccatcatcaccatcac

SEQ ID NO: 1096 - protein, 211 aa, synthetic construct
  REGION 1..211: note = Variant of 3'O-kinase
MAFTIGLTGGIAAGKSTVSAMMRELGLPVIDADEAARAVMKPGEEAYRDIVAAFGPGILRADGEIDRQKLGAIRFSDEQQRKVLNSIVGPAVLKKMLAEKEAHIRSGAKTVVLDIPLLFESGLQQWVDKVLVVYVDDDVQLRRLMARNGFTEEEALKRIRSQWPSIEKVKRADAVIDNNGNIEETRRQLLDILHQWDLLGKGGSGHHHHHH

SEQ ID NO: 1097 - DNA, 633 bp, synthetic construct
  misc_feature 1..633: note = Variant of 3'O-kinase
  source 1..633: mol_type = other DNA
atggcggttaccattggtttaacaggagggatcgcagcgggcaaatcgactgtgagtgccatgatgcgtgaactgggtctgccggtcatcgatgctgacgaggcagcacgcgccgttatgaagccaggcgaagaagcgtatcgcgacattgtagctgcgttcggtccgggcattcttcgtgccgatggcgagatcgatcgccagaaactgggtgctatccgcttttcggacgaacaacaactgaagatgctgaattcgattgtaggtcctgcagtcctgaagaagatgctcgctgagaaagaagctcatatccgttcaggcgccaagacggttgtgctggatatcccgctgctgttcgaatccggattgagttcgtgggtcgacaaagtgctcgtggtgtacgtcgatgatgatgttcagttacgccgccttatggcacgtaacgggtttactgaagaagaagctctgaagcgcattcgttcacagtggcccagtgcggagaaagttaaacgcgcagacgctgtcatcgacaataatggcaatattgaagaaacccgccgccagctgctggacattttacaccagtgggatctgctggacaagggtggctccggccaccatcatcaccatcac

SEQ ID NO: 1098 - protein, 211 aa, synthetic construct
  REGION 1..211: note = Variant of 3'O-kinase
MAVTIGLTGGIAAGKSTVSAMMRELGLPVIDADEAARAVMKPGEEAYRDIVAAFGPGILRADGEIDRQKLGAIRFSDEQQLKMLNSIVGPAVLKKMLAEKEAHIRSGAKTVVLDIPLLFESGLSSWVDKVLVVYVDDDVQLRRLMARNGFTEEEALKRIRSQWPSAEKVKRADAVIDNNGNIEETRRQLLDILHQWDLLDKGGSGHHHHHH

SEQ ID NO: 1099 - DNA, 633 bp, synthetic construct
  misc_feature 1..633: note = Variant of 3'O-kinase
  source 1..633: mol_type = other DNA
atggcgtttaccattggtttaacaggagggatcgcagcgggcaaatcgactgtgagtgccatgatgcgtgaactgggtctgccggtcatcgatgctgacgaggcagcacgcgccgttatgaagccaggcgaagaagcgtatcgccagattgtagctgcgttcggtccgggcattcttcgcgccgatggcgagatcgatcgccagaaactgggtgcgatccgcttttcggacgaacaacaacgcaaggtgctgaattcgattgtaggtcctgcagtcctgaagaagatgctcgctgagaaagaagctcatatccgctcaggcgccaagacggttgtgctggatatcccgctgctgttcgaatccggattgacccatgtggtcgacaaagtgctcgtggtgtacgtcgatgatgatgttcagttacgccgccttatggcacgtaacgggtttactgaagaagaagctctgaagcgcattcgttcacagtggcccagtgcggagaaagttaaacgtgcagacgctgtcatcgacaataatggcaatattgaagaaacccgccgccagctgctggacattttacaccagtgggatctgctgggtaagggtggctccggccaccatcatcaccatcac

SEQ ID NO: 1100 - protein, 211 aa, synthetic construct
  REGION 1..211: note = Variant of 3'O-kinase
MAFTIGLTGGIAAGKSTVSAMMRELGLPVIDADEAARAVMKPGEEAYRQIVAAFGPGILRADGEIDRQKLGAIRFSDEQQRKVLNSIVGPAVLKKMLAEKEAHIRSGAKTVVLDIPLLFESGLTHVVDKVLVVYVDDDVQLRRLMARNGFTEEEALKRIRSQWPSAEKVKRADAVIDNNGNIEETRRQLLDILHQWDLLGKGGSGHHHHHH

SEQ ID NO: 1101 - DNA, 633 bp, synthetic construct
  misc_feature 1..633: note = Variant of 3'O-kinase
  source 1..633: mol_type = other DNA
atggcggttaccattggtttaacaggagggatcgcagcgggcaaatcgactgtgagtgccatgatgcgtgaactgggtctgccggtcatcgatgctgacgaggcagcacgcgccgttatgaagccaggcgaagaagcgtatcgcgacattgtagctgcgttcggtccgggcattcttcgtgcggatggcgagatcgatcgccagaaactgggtgctatccgcttttcggacgaacaacaactgaagatgctgaattcgattgtaggtcctgcagtcctgaagaagatgctcgctgagaaagaagctcatatccgctcaggcgccaagacggttgtgctggatatcccgctgctgttcgaatccggattgcaatcgtgggtcgacaaagtgctcgtggtgtacgtcgatgatgatgttcagttacgccgccttatggcacgtaacgggtttactgaagaagaagctctgaagcgcattcgttcacagtggcccagtgcggagaaagttaaaatggcagacgctgtcatcgacaataatggcaatattgaagaaacccgccgccagctgctggacattttacaccagtgggatctgctgggcaagggtggctccggccaccatcatcaccatcac

SEQ ID NO: 1102 - protein, 211 aa, synthetic construct
  REGION 1..211: note = Variant of 3'O-kinase
MAVTIGLTGGIAAGKSTVSAMMRELGLPVIDADEAARAVMKPGEEAYRDIVAAFGPGILRADGEIDRQKLGAIRFSDEQQLKMLNSIVGPAVLKKMLAEKEAHIRSGAKTVVLDIPLLFESGLQSWVDKVLVVYVDDDVQLRRLMARNGFTEEEALKRIRSQWPSAEKVKMADAVIDNNGNIEETRRQLLDILHQWDLLGKGGSGHHHHHH

SEQ ID NO: 1103 - DNA, 633 bp, synthetic construct
  misc_feature 1..633: note = Variant of 3'O-kinase
  source 1..633: mol_type = other DNA
atggcgtttaccattggtttaacaggagggatcgcagcgggcaaatcgactgtgagtgccatgatgcgtgaactgggtctgccggtcatcgatgctgacgaggcagcacgcgccgttatgaagccaggcgaagaagcgtatcgccagattgtagctgcgttcggtccgggcattcttcgtgccgatggcgagatcgatcgccagaaactgggtgctatccgcttttcggacgaacaacaacgtaaggtgctgaattcgattgtaggtcctgcagtcctgaagaagatgctcgctgagaaagaagctcatatccgctcaggcgccaagacggttgtgctggatatcccgctgctgttcgaatccggattgacccattgggtcgacaaagtgctcgtggtgtacgtcgatgatgatgttcagttacgccgccttatggcacgtaacgggtttactgaagaagaagctctgaagcgcattcgttcacagtggcccagtgcggagaaagttaaacgtgcagacgctgtcatcgacaataatggcaatattgaagaaacccgccgccagctgctggacattttacaccagtgggatctgctggacaagggtggctccggccaccatcatcaccatcac

SEQ ID NO: 1104 - protein, 211 aa, synthetic construct
  REGION 1..211: note = Variant of 3'O-kinase
MAFTIGLTGGIAAGKSTVSAMMRELGLPVIDADEAARAVMKPGEEAYRQIVAAFGPGILRADGEIDRQKLGAIRFSDEQQRKVLNSIVGPAVLKKMLAEKEAHIRSGAKTVVLDIPLLFESGLTHWVDKVLVVYVDDDVQLRRLMARNGFTEEEALKRIRSQWPSAEKVKRADAVIDNNGNIEETRRQLLDILHQWDLLDKGGSGHHHHHH

SEQ ID NO: 1105 - DNA, 633 bp, synthetic construct
  misc_feature 1..633: note = Variant of 3'O-kinase
  source 1..633: mol_type = other DNA
atggcgtttaccattggtttaacaggagggatcgcagcgggcaaatcgactgtgagtgccatgatgcgtgaactgggtctgccggtcatcgatgctgacgaggcagcacgcgccgttatgaagccaggcgaagaagcgtatcgccagattgtagctgcgttcggtccgggcattcttcgcgccgatggcgagatcgatcgccagaaactgggtgctatccgcttttcggacgaacaacaacgtgaaatgctgaattcgattgtaggtcctgcagtcctgaagaagatgctcgctgagaaagaagctttcatccgctcaggcgccaagacggttgtgctggatatcccgctgctgttcgaatccggattgacccattgggtcgacaaagtgctcgtggtgtacgtcgatgatgatgttcagttacgccgccttatggcacgtaacgggtttactgaagaagaagctctgaagcgcattcgttcacagtggcccagtgcggagaaagttaaacgtgcagacgctgtcatcgacaataatggcaatattgaagaaacccgccgccagctgctggacattttacaccagtgggatctgctgggtaagggtggctccggccaccatcatcaccatcac

SEQ ID NO: 1106 - protein, 211 aa, synthetic construct
  REGION 1..211: note = Variant of 3'O-kinase
MAFTIGLTGGIAAGKSTVSAMMRELGLPVIDADEAARAVMKPGEEAYRQIVAAFGPGILRADGEIDRQKLGAIRFSDEQQREMLNSIVGPAVLKKMLAEKEAFIRSGAKTVVLDIPLLFESGLTHWVDKVLVVYVDDDVQLRRLMARNGFTEEEALKRIRSQWPSAEKVKRADAVIDNNGNIEETRRQLLDILHQWDLLGKGGSGHHHHHH

SEQ ID NO: 1107 - DNA, 633 bp, synthetic construct
  misc_feature 1..633: note = Variant of 3'O-kinase
  source 1..633: mol_type = other DNA
atggcgtttaccattggtttaacaggagggatcgcagcgggcaaatcgactgtgagtgccatgatgcgtgaactgggtctgccggtcatcgatgctgacgaggcagcacgcgccgttatgaagccaggcgaagaagcgtatcgccagattgtagctgcgttcggtccgggcattcttcgtgccgatggcgagatcgatcgccagaaactgggtcagatccgcttttcggacgaacaacaacgtgaaatgctgaattcgattgtaggtcctgcagtcctgaagaagatgctggctgagaaagaagctcatatccgctcaggcgccaagacggttgtgctggatatcccgctgctgttcgaatccggattgacccattgggtcgacaaagtgctcgtggtgtacgtcgatgatgatgttcagttaaagcgccttatggcacgtaacgggtttactgaagaagaagctctgaagcgcattcgttcacagtggcccagtgcggagaaagttaaacgtgcagacgctgtgatcgacaataatggcacgattgaagaaacccgccgccagctgctggccattttacaccagtgggatctgctgaataagggtggctccggccaccatcatcaccatcac

SEQ ID NO: 1108 - protein, 211 aa, synthetic construct
  REGION 1..211: note = Variant of 3'O-kinase
MAFTIGLTGGIAAGKSTVSAMMRELGLPVIDADEAARAVMKPGEEAYRQIVAAFGPGILRADGEIDRQKLGQIRFSDEQQREMLNSIVGPAVLKKMLAEKEAHIRSGAKTVVLDIPLLFESGLTHWVDKVLVVYVDDDVQLKRLMARNGFTEEEALKRIRSQWPSAEKVKRADAVIDNNGTIEETRRQLLAILHQWDLLNKGGSGHHHHHH

SEQ ID NO: 1109 - DNA, 633 bp, synthetic construct
  misc_feature 1..633: note = Variant of 3'O-kinase
  source 1..633: mol_type = other DNA
atggcgtttaccattggtttaacaggagggatcgcagcgggcaaatcgactgtgagtgccatgatgcgtgaactgggtctgccggtcatcgatgctgacgaggcagcacgcgccgttatgaagccaggcgaagaagcgtatcgccagattgtagctgcgttcggtccgggcattcttcgtgccgatggcgagatcgatcgccagaaactgggtgctatccgcttttcggacgaacaacaacgtaaggtgctgaattcgattgtaggtcctgcagtcctgaagaagatgctcgctgagaaagaagctcatatccgctcaggcgccaagacggttgtgctggatatcccgctgctgttcgaatccggattgacccattgggtcgacaaagtgctcgtggtgtacgtcgatgatgatgttcagttacgccgccttatggcacgtaacgggtttactgaagaagaagctctgaagcgcattcgttcacagtggcccagtgcggagaaagttaaacgtgcagacgctgtcatcgacaataatggcaatgaagaagaaacccgccgccagctgctggacattttacaccagtgggatctgctgggtaagggtggctccggccaccatcatcaccatcac

SEQ ID NO: 1110 - protein, 211 aa, synthetic construct
  REGION 1..211: note = Variant of 3'O-kinase
MAFTIGLTGGIAAGKSTVSAMMRELGLPVIDADEAARAVMKPGEEAYRQIVAAFGPGILRADGEIDRQKLGAIRFSDEQQRKVLNSIVGPAVLKKMLAEKEAHIRSGAKTVVLDIPLLFESGLTHWVDKVLVVYVDDDVQLRRLMARNGFTEEEALKRIRSQWPSAEKVKRADAVIDNNGNEEETRRQLLDILHQWDLLGKGGSGHHHHHH

SEQ ID NO: 1111 - DNA, 633 bp, synthetic construct
  misc_feature 1..633: note = Variant of 3'O-kinase
  source 1..633: mol_type = other DNA
atggcggttaccattggtttaacaggagggatcgcagcgggcaaatcgactgtgagtgccatgatgcgtgaactgggtctgccggtcatcgatgctgacgaggcagcacgcgccgttatgaagccaggcgaagaagcgtatcgcgacattgtagctgcgttcggtccgggcattcttcgtgcggatggcgagatcgatcgccagaaactgggtgctatccgcttttcggacgaacaacaacgcaaggtgctgaattcgattgtaggtcctgcagtcctgaagaagatgctcgctgagaaagaagctcatatccgttcaggcgccaagacggttgtgctggatatcccgctgctgttcgaatccggattgacccattgggtcgacaaagtgctcgtggtgtacgtcgatgatgatgttcagttacgccgccttatggcacgtaacgggtttactgaagaagaagctctgaagcgcattcgttcacagtggcccagtgaggagaaagttaaaatggcagacgctgtcatcgacaataatggcaatattgaagaaacccgccgccagctgctggacattttacaccagtgggatctgctgggtaagggtggctccggccaccatcatcaccatcac

SEQ ID NO: 1112 - protein, 211 aa, synthetic construct
  REGION 1..211: note = Variant of 3'O-kinase
MAVTIGLTGGIAAGKSTVSAMMRELGLPVIDADEAARAVMKPGEEAYRDIVAAFGPGILRADGEIDRQKLGAIRFSDEQQRKVLNSIVGPAVLKKMLAEKEAHIRSGAKTVVLDIPLLFESGLTHWVDKVLVVYVDDDVQLRRLMARNGFTEEEALKRIRSQWPSEEKVKMADAVIDNNGNIEETRRQLLDILHQWDLLGKGGSGHHHHHH

SEQ ID NO: 1113 - DNA, 633 bp, synthetic construct
  misc_feature 1..633: note = Variant of 3'O-kinase
  source 1..633: mol_type = other DNA
atggcggttaccattggtttaacaggagggatcgcagcgggcaaatcgactgtgagtgccatgatgcgtgaactgggtctgccggtcatcgatgctgacgaggcagcacgcgccgttatgaagccaggcgaagaagcgtatcgcgacattgtagctgcgttcggtccgggcattcttcgtgaggatggcgagatcgatcgccagaaactgggtgctatccgcttttcggacgaacaacaacgcaagatgctgaattcgattgtaggtcctgcagtcctgaagaagatgctcgctgagaaagaagctcatatccgttcaggcgccaagacggttgtgctggatatcccgctgctgttcgaatccggattgacccattgggtcgacaaagtgctcgtggtgtacgtcgatgatgatgttcagttacgccgccttatggcacgtaacgggtttactgaagaagaagctctgaagcgcattcgttcacagtggcccagtgcggagaaagttaaacgcgcagacgctgtcatcgacaataatggcaatattgaagaaacccgccgccagctgctggacattttacaccagtgggatctgctgggcaagggtggctccggccaccatcatcaccatcac

SEQ ID NO: 1114 - protein, 211 aa, synthetic construct
  REGION 1..211: note = Variant of 3'O-kinase
MAVTIGLTGGIAAGKSTVSAMMRELGLPVIDADEAARAVMKPGEEAYRDIVAAFGPGILREDGEIDRQKLGAIRFSDEQQRKMLNSIVGPAVLKKMLAEKEAHIRSGAKTVVLDIPLLFESGLTHWVDKVLVVYVDDDVQLRRLMARNGFTEEEALKRIRSQWPSAEKVKRADAVIDNNGNIEETRRQLLDILHQWDLLGKGGSGHHHHHH

SEQ ID NO: 1115 - DNA, 633 bp, synthetic construct
  misc_feature 1..633: note = Variant of 3'O-kinase
  source 1..633: mol_type = other DNA
atggcggttaccattggtttaacaggagggatcgcagcgggcaaatcgactgtgagtgccatgatgcgtgaactgggtctgccggtcatcgatgctgacgaggcagcacgcgccgttatgaagccaggcgaagaagcgtatcgccaaattgtagctgcgttcggtccgggcattcttcgtgccgatggcgagatcgatcgccagaaactgggtgctatccgcttttcggacgaacaacaacgcaagatgctgaattcgattgtaggtcctgcagtcctgaagaagatgctcgctgagaaagaagctcatatccgctcaggcgccaagacggttgtgctggatatcccgctgctgttcgaatccggattgacccattgggtcgacaaagtgctcgtggtgtacgtcgatgatgatgttcagttacgccgccttatggcacgtaacgggtttactgaagaagaagctctgaagcgcattcgttcacagtggcccagtattgagaaagttaaaatggcagacgctgtcatcgacaataatggcaatattgaagaaacccgccgccagctgctggacattttacaccagtgggatctgctgggtaagggtggctccggccaccatcatcaccatcac

SEQ ID NO: 1116 - protein, 211 aa, synthetic construct
  REGION 1..211: note = Variant of 3'O-kinase
MAVTIGLTGGIAAGKSTVSAMMRELGLPVIDADEAARAVMKPGEEAYRQIVAAFGPGILRADGEIDRQKLGAIRFSDEQQRKMLNSIVGPAVLKKMLAEKEAHIRSGAKTVVLDIPLLFESGLTHWVDKVLVVYVDDDVQLRRLMARNGFTEEEALKRIRSQWPSIEKVKMADAVIDNNGNIEETRRQLLDILHQWDLLGKGGSGHHHHHH

SEQ ID NO: 1117 - DNA, 633 bp, synthetic construct
  misc_feature 1..633: note = Variant of 3'O-kinase
  source 1..633: mol_type = other DNA
atggcgtttaccattggtttaacaggagggatcgcagcgggcaaatcgactgtgagtgccatgatgcgtgaactgggtctgccggtcatcgatgctgacgaggcagcacgcgccgttatgaagccaggcgaagaagcgtatcgccaaattgtagctgcgttcggtccgggcattcttcgtgccgatggcgagatcgatcgccagaaactgggtgctatccgcttttcggacgaacaacaacgtaaggtgctgaattcgattgtaggtcctgcagtcctgaagaagatgctcgctgagaaagaagctcatatccgctcaggcgccaagacggttgtgctggatatcccgctgctgttcgaatccggattgcaatcgtgggtcgacaaagtgctcgtggtgtacgtcgatgatgatgttcagttacgccgccttatggcacgtaacgggtttactgaagaagaagctctgaagcgcattcgttcacagtggcccagtgcggagaaagttaaacgtgcagacgctgtcatcgacaataatggcaatattgaagaaacccgccgccagctgctggacattttacaccagtgggatctgctgggcaagggtggctccggccaccatcatcaccatcac

SEQ ID NO: 1118 - protein, 211 aa, synthetic construct
  REGION 1..211: note = Variant of 3'O-kinase
MAFTIGLTGGIAAGKSTVSAMMRELGLPVIDADEAARAVMKPGEEAYRQIVAAFGPGILRADGEIDRQKLGAIRFSDEQQRKVLNSIVGPAVLKKMLAEKEAHIRSGAKTVVLDIPLLFESGLQSWVDKVLVVYVDDDVQLRRLMARNGFTEEEALKRIRSQWPSAEKVKRADAVIDNNGNIEETRRQLLDILHQWDLLGKGGSGHHHHHH

SEQ ID NO: 1119 - DNA, 633 bp, synthetic construct
  misc_feature 1..633: note = Variant of 3'O-kinase
  source 1..633: mol_type = other DNA
atggcgtttaccattggtttaacaggagggatcgcagcgggcaaatcgactgtgagtgccatgatgcgtgaactgggtctgccggtcatcgatgctgacgaggcagcacgcgccgttatgaagccaggcgaagaagcgtatcgccagattgtagctgcgttcggtccgggcattcttcgtgccgatggcgagatcgatcgccagaaactgggtgctatccgcttttcggacgaacaacaacgtaaggtgctgaattcgattgtaggtcctgcagtcctgaagaagatgctcgctgagaaagaagctcatatccgctcaggcgccaagacggttgtgctggatatcccgctgctgttcgaatccggattgacccattgggtcgacaaagtgctcgtggtgtacgtcgatgatgatgttcagttaaagcgccttatggcacgtaacgggtttactgaagaagaagctctgaagcgcattcgttcacagtggcccagtgcggagaaagttaaacgtgcagacgctgtcatcgacaataatggcaatattgaagaaacccgccgccagctgctggacattttacaccagtgggatctgctgggtaagggtggctccggccaccatcatcaccatcac

SEQ ID NO: 1120 - protein, 211 aa, synthetic construct
  REGION 1..211: note = Variant of 3'O-kinase
MAFTIGLTGGIAAGKSTVSAMMRELGLPVIDADEAARAVMKPGEEAYRQIVAAFGPGILRADGEIDRQKLGAIRFSDEQQRKVLNSIVGPAVLKKMLAEKEAHIRSGAKTVVLDIPLLFESGLTHWVDKVLVVYVDDDVQLKRLMARNGFTEEEALKRIRSQWPSAEKVKRADAVIDNNGNIEETRRQLLDILHQWDLLGKGGSGHHHHHH

SEQ ID NO: 1121 - DNA, 633 bp, synthetic construct
  misc_feature 1..633: note = Variant of 3'O-kinase
  source 1..633: mol_type = other DNA
atggcgtttaccattggtttaacaggagggatcgcagcgggcaaatcgactgtgagtgccatgatgcgtgaactgggtctgccggtcatcgatgctgacgaggcagcacgcgccgttatgaagccaggcgaagaagcgtatcgcgacattgtagctgcgttcggtccgggcattcttcgtgccgatggcgagatcgatcgccagaaactgggtgctatccgcttttcggacgaacaacaacgcaagatgctgaattcgattgtaggtcctgcagtcctgaagaagatgctcgctgagaaagaagctcatatcaagtcaggcgccaagacgattgtgctggatatcccgctgctgttcgaatccggattgcaacactgggtcgacaaagtgctcgtggtgtacgtcgatgatgatgttcagttacgccgccttatggcacgtaacgggtttactgaagaagaagctctgaagcgcattcgttcacagtggcccagtgcggagaaagttaaacgtgcagacgctgtcatcgacaataatggcaatattgaagaaacccgccgccagctgctggacattttacaccagtgggatctgctgggcaagggtggctccggccaccatcatcaccatcac

SEQ ID NO: 1122 - protein, 211 aa, synthetic construct
  REGION 1..211: note = Variant of 3'O-kinase
MAFTIGLTGGIAAGKSTVSAMMRELGLPVIDADEAARAVMKPGEEAYRDIVAAFGPGILRADGEIDRQKLGAIRFSDEQQRKMLNSIVGPAVLKKMLAEKEAHIKSGAKTIVLDIPLLFESGLQHWVDKVLVVYVDDDVQLRRLMARNGFTEEEALKRIRSQWPSAEKVKRADAVIDNNGNIEETRRQLLDILHQWDLLGKGGSGHHHHHH

SEQ ID NO: 1123 - DNA, 633 bp, synthetic construct
  misc_feature 1..633: note = Variant of 3'O-kinase
  source 1..633: mol_type = other DNA
atggcgtttaccattggtttaacaggagggatcgcagcgggcaaatcgactgtgagtgccatgatgcgtgaactgggtctgccggtcatcgatgctgacgaggcagcacgcgccgttatgaagccaggcgaagaagcgtatcgcgacattgtagctgcgttcggtccgggcattcttcgtgaggatggcgagatcgatcgccagaaactgggtgctatccgcttttcggacgaacaacaactgaagatgctgaattcgattgtaggtcctgcagtcctgaagaagatgctcgctgagaaagaagctcatatccgctcaggcgccaagacggttgtgctggatatcccgctgctgttcgaatccggattgacccattgggtcgacaaagtgctcgtggtgtacgtcgatgatgatgttcagttacgccgccttatggcacgtaacgggtttactgaagaagaagctctgaagcgcattcgttcacagtggcccagtgcggagaaagttaaacgcgcagacgctgtcatcgacaataatggcaatattgaagaaacccgccgccagctgctggacattttacaccagtgggatctgctgggtaagggtggctccggccaccatcatcaccatcac

SEQ ID NO: 1124 - protein, 211 aa, synthetic construct
  REGION 1..211: note = Variant of 3'O-kinase
MAFTIGLTGGIAAGKSTVSAMMRELGLPVIDADEAARAVMKPGEEAYRDIVAAFGPGILREDGEIDRQKLGAIRFSDEQQLKMLNSIVGPAVLKKMLAEKEAHIRSGAKTVVLDIPLLFESGLTHWVDKVLVVYVDDDVQLRRLMARNGFTEEEALKRIRSQWPSAEKVKRADAVIDNNGNIEETRRQLLDILHQWDLLGKGGSGHHHHHH

SEQ ID NO: 1125 - DNA, 633 bp, synthetic construct
  misc_feature 1..633: note = Variant of 3'O-kinase
  source 1..633: mol_type = other DNA
atggcgtttaccattggtttaacaggagggatcgcagcgggcaaatcgactgtgagtgccatgatgcgtgaactgggtctgccggtcatcgatgctgacgaggcagcacgcgccgttatgaagccaggcgaagaagcgtatcgccaggttgtagctgcgttcggtccgggcattcttctggccgatggcgagatcgatcgccagaaactgggtgctatccgcttttcggacgaacaacaacgtgaaatgctgaattcgattgtaggtcctgcagtcctgaagaagatgctggctgagaaagaagctatgatccgctcaggcgccaagacggtcgtgctggatatcccgctgctgttcgaatccggattgacccatctggtcgacaaagtgctcgtggtgtacgttgatgatgatgttcagttaaagcgccttatggcacgtaacgggtttactgaagaagaagctctgaagcgcattcgttcacagtggcccagtgcggagaaagttaaacgtgcagacgcttggatcgacaataatggcaatattgaagaaacccgccgccagctgctggccattttacaccagtgggatctgctgggtaagggtggctccggccaccatcatcaccatcac

SEQ ID NO: 1126 - protein, 211 aa, synthetic construct
  REGION 1..211: note = Variant of 3'O-kinase
MAFTIGLTGGIAAGKSTVSAMMRELGLPVIDADEAARAVMKPGEEAYRQVVAAFGPGILLADGEIDRQKLGAIRFSDEQQREMLNSIVGPAVLKKMLAEKEAMIRSGAKTVVLDIPLLFESGLTHLVDKVLVVYVDDDVQLKRLMARNGFTEEEALKRIRSQWPSAEKVKRADAWIDNNGNIEETRRQLLAILHQWDLLGKGGSGHHHHHH

SEQ ID NO: 1127 - DNA, 633 bp, synthetic construct
  misc_feature 1..633: note = Variant of 3'O-kinase
  source 1..633: mol_type = other DNA
atggcgtttaccattggtttaacaggagggatcgcagcgggcaaatcgactgtgagtgccatgatgcgtgaactgggtctgccggtcatcgatgctgacgaggcagcacgcgccgttatgaagccaggcgaagaagcgtatcgccagattgtagctgcgttcggtccgggcattcttcgcgccgatggcgagatcgatcgccagaaactgggtgctatccgcttttcggacgaacaacaacgtaaaatgctgaattcgattgtaggtcctgaggtcctggcgattatgctggctgagaaagaagctcatatccgctcaggcgccaagacggttgtgctggatatcccgctgctgttcgaatccggattgacccatctggtcgacaaagtgctcgtggtgtacgatgatgatgatgttcagttacgccgccttatggcacgtaacgggtttactgaagaagaagctctgaagcgcattcgttcacagtggcccagtgcggagaaagttaaacgtgcagacgctgtcatcgacaataatggcaatattgaagaaacccgccgccagctgctggccattttacaccagtgggatctgctgggtaagggtggctccggccaccatcatcaccatcac

SEQ ID NO: 1128 - protein, 211 aa, synthetic construct
  REGION 1..211: note = Variant of 3'O-kinase
MAFTIGLTGGIAAGKSTVSAMMRELGLPVIDADEAARAVMKPGEEAYRQIVAAFGPGILRADGEIDRQKLGAIRFSDEQQRKMLNSIVGPEVLAIMLAEKEAHIRSGAKTVVLDIPLLFESGLTHLVDKVLVVYDDDDVQLRRLMARNGFTEEEALKRIRSQWPSAEKVKRADAVIDNNGNIEETRRQLLAILHQWDLLGKGGSGHHHHHH

SEQ ID NO: 1129 - DNA, 633 bp, synthetic construct
  misc_feature 1..633: note = Variant of 3'O-kinase
  source 1..633: mol_type = other DNA
atggcgtttaccattggtttaacaggagggatcgcagcgggcaaatcgactgtgagtgccatgatgcgtgaactgggtctgccggtcatcgatgctgacgaggcagcacgcgccgttatgaagccaggcgaagaagcgtatcgccagattgtagctgcgttcggtccgggcattcttctggccgatggcgagatcgatcgccagaaactgggtgctatccgcttttcggacgaacaacaacgtaaggtgctgaattcgattgtaggtcctgcagtcctgaagaagatgctggctgagaaagaagctcatatccgctcaggcgccaagacggttgtgctggatatcccgctgctgttcgaatccggattgacccattgggtcgacaaagtgctcgtggtgtacgtcgatgatgatgttcagttacgccgccttatggcacgtaacgggtttactgaagaagaagctctgaagcgcattcgttcacagtggcccagtgcggagaaagttaaacgtgcagacgctgtcatcgacaataatggcaatgaagaagaaacccgccgccagctgctggacattttacaccagtgggatctgctgggtaagggtggctccggccaccatcatcaccatcac

SEQ ID NO: 1130 - protein, 211 aa, synthetic construct
  REGION 1..211: note = Variant of 3'O-kinase
MAFTIGLTGGIAAGKSTVSAMMRELGLPVIDADEAARAVMKPGEEAYRQIVAAFGPGILLADGEIDRQKLGAIRFSDEQQRKVLNSIVGPAVLKKMLAEKEAHIRSGAKTVVLDIPLLFESGLTHWVDKVLVVYVDDDVQLRRLMARNGFTEEEALKRIRSQWPSAEKVKRADAVIDNNGNEEETRRQLLDILHQWDLLGKGGSGHHHHHH

SEQ ID NO: 1131 - DNA, 633 bp, synthetic construct
  misc_feature 1..633: note = Variant of 3'O-kinase
  source 1..633: mol_type = other DNA
atggcgtttaccattggtttaacaggagggatcgcagcgggcaaatcgactgtgagtgccatgatgcgtgaactgggtctgccggtcatcgatgctgacgaggcagcacgcgccgttatgaagccaggcgaagaagcgtatcgccagattgtagctgcgttcggtccgggcattcttcgtgccgatggcgagatcgatcgccagaaactgggtgctatccgcttttcggacgaacaacaacgcaagatgctgaattcgattgtaggtcctgcagtcctgaagaagatgctcgctgagaaagaagctcatatcaagtcaggcgccaagacggttgtgctggatatcccgctgctgttcgaatccggattgacccattgggtcgacaaagtgctcgtggtgtacgtcgatgatgatgttcagttacgccgccttatggcacgtaacgggtttactgaagaagaagctctgaagcgcattcgttcacagtggcccagtgaggagaaagttaaacgcgcagacgctgtcatcgacaataatggcaatattgaagaaacccgccgccagctgctggacattttacaccagtgggatctgctgggtaagggtggctccggccaccatcatcaccatcac

SEQ ID NO: 1132 - protein, 211 aa, synthetic construct
  REGION 1..211: note = Variant of 3'O-kinase
MAFTIGLTGGIAAGKSTVSAMMRELGLPVIDADEAARAVMKPGEEAYRQIVAAFGPGILRADGEIDRQKLGAIRFSDEQQRKMLNSIVGPAVLKKMLAEKEAHIKSGAKTVVLDIPLLFESGLTHWVDKVLVVYVDDDVQLRRLMARNGFTEEEALKRIRSQWPSEEKVKRADAVIDNNGNIEETRRQLLDILHQWDLLGKGGSGHHHHHH

SEQ ID NO: 1133 - DNA, 633 bp, synthetic construct
  misc_feature 1..633: note = Variant of 3'O-kinase
  source 1..633: mol_type = other DNA
atggcgtttaccattggtttaacaggagggatcgcagcgggcaaatcgactgtgagtgccatgatgcgtgaactgggtctgccggtcatcgatgctgacgaggcagcacgcgccgttatgaagccaggcgaagaagcgtatcgcgacattgtagctgcgttcggtccgggcattcttcgtgcggatggcgagatcgatcgccagaaactgggtgctatccgcttttcggacgaacaacaacgcaagatgctgaattcgattgtaggtcctgcagtcctgaagaagatgctcgctgagaaagaagctcatatcaagtcaggcgccaagacggttgtgctggatatcccgctgctgttcgaatccggattgcaacagtgggtcgacaaagtgctcgtggtgtacgtcgatgatgatgttcagttacgccgccttatggcacgtaacgggtttactgaagaagaagctctgaagcgcattcgttcacagtggcccagtattgagaaagttaaacgcgcagacgctgtcatcgacaataatggcaatattgaagaaacccgccgccagctgctggacattttacaccagtgggatctgctgggcaagggtggctccggccaccatcatcaccatcac

SEQ ID NO: 1134 - protein, 211 aa, synthetic construct
  REGION 1..211: note = Variant of 3'O-kinase
MAFTIGLTGGIAAGKSTVSAMMRELGLPVIDADEAARAVMKPGEEAYRDIVAAFGPGILRADGEIDRQKLGAIRFSDEQQRKMLNSIVGPAVLKKMLAEKEAHIKSGAKTVVLDIPLLFESGLQQWVDKVLVVYVDDDVQLRRLMARNGFTEEEALKRIRSQWPSIEKVKRADAVIDNNGNIEETRRQLLDILHQWDLLGKGGSGHHHHHH

SEQ ID NO: 1135 - DNA, 633 bp, synthetic construct
  misc_feature 1..633: note = Variant of 3'O-kinase
  source 1..633: mol_type = other DNA
atggcgtttaccattggtttaacaggagggatcgcagcgggcaaatcgactgtgagtgccatgatgcgtgaactgggtctgccggtcatcgatgctgacgaggcagcacgcgccgttatgaagccaggcgaagaagcgtatcgccaaattgtagctgcgttcggtccgggcattcttcgtgcggatggcgagatcgatcgccagaaactgggtgctatccgcttttcggacgaacaacaacgcaaggtgctgaattcgattgtaggtcctgcagtcctgaagaagatgctcgctgagaaagaagctcatatcaagtcaggcgccaagacggttgtgctggatatcccgctgctgttcgaatccggattgacccattgggtcgacaaagtgctcgtggtgtacgtcgatgatgatgttcagttacgccgccttatggcacgtaacgggtttactgaagaagaagctctgaagcgcattcgttcacagtggcccagtgcggagaaagttaaacgcgcagacgctgtcatcgacaataatggcaatattgaagaaacccgccgccagctgctggacattttacaccagtgggatctgctgggtaagggtggctccggccaccatcatcaccatcac

SEQ ID NO: 1136 - protein, 211 aa, synthetic construct
  REGION 1..211: note = Variant of 3'O-kinase
MAFTIGLTGGIAAGKSTVSAMMRELGLPVIDADEAARAVMKPGEEAYRQIVAAFGPGILRADGEIDRQKLGAIRFSDEQQRKVLNSIVGPAVLKKMLAEKEAHIKSGAKTVVLDIPLLFESGLTHWVDKVLVVYVDDDVQLRRLMARNGFTEEEALKRIRSQWPSAEKVKRADAVIDNNGNIEETRRQLLDILHQWDLLGKGGSGHHHHHH

SEQ ID NO: 1137 - DNA, 633 bp, synthetic construct
  misc_feature 1..633: note = Variant of 3'O-kinase
  source 1..633: mol_type = other DNA
atggcgtttaccattggtttaacaggagggatcgcagcgggcaaatcgactgtgagtgccatgatgcgtgaactgggtctgccggtcatcgatgctgacgaggcagcacgcgccgttatgaagccaggcgaagaagcgtatcgccagattgtagctgcgttcggtccgggcattcttcgtgccgatggcgagatcgatcgccagaaactgggtgctatccgcttttcggacgaacaacaacgtaaggtgctgaattcgattgtaggtcctgcagtcctgaagaagatgctcgctgagaaagaagctcatatccgctcaggcgccaagacgatcgtgctggatatcccgctgctgttcgaatccggattgacccatgtggtcgacaaagtgctcgtggtgtacgatgatgatgatgttcagttacgtcgccttatggcacgtaacgggtttactgaagaagaagctctgaagcgcattcgttcacagtggcccagtgcggagaaagttaaacgtgcagacgcttggatcgacaataatggcaatgaagaagaaacccgccgccagctgctggacattttacaccagtgggatctgctgggtaagggtggctccggccaccatcatcaccatcac

SEQ ID NO: 1138 - protein, 211 aa, synthetic construct
  REGION 1..211: note = Variant of 3'O-kinase
MAFTIGLTGGIAAGKSTVSAMMRELGLPVIDADEAARAVMKPGEEAYRQIVAAFGPGILRADGEIDRQKLGAIRFSDEQQRKVLNSIVGPAVLKKMLAEKEAHIRSGAKTIVLDIPLLFESGLTHVVDKVLVVYDDDDVQLRRLMARNGFTEEEALKRIRSQWPSAEKVKRADAWIDNNGNEEETRRQLLDILHQWDLLGKGGSGHHHHHH

SEQ ID NO: 1139 - DNA, 633 bp, synthetic construct
  misc_feature 1..633: note = Variant of 3'O-kinase
  source 1..633: mol_type = other DNA
atggcgtttaccattggtttaacaggagggatcgcagcgggcaaatcgactgtgagtgccatgatgcgtgaactgggtctgccggtcatcgatgctgacgaggcagcacgcgccgttatgaagccaggcgaagaagcgtatcgccaaattgtagctgcgttcggtccgggcattcttcgtgccgatggcgagatcgatcgccagaaactgggtgctatccgcttttcggacgaacaacaacgcaagatgctgaattcgattgtaggtcctgcagtcctgaagaagatgctcgctgagaaagaagctcatatccgctcaggcgccaagacggttgtgctggatatcccgctgctgttcgaatccggattgacttcgtgggtcgacaaagtgctcgtggtgtacgtcgatgatgatgttcagttacgccgccttatggcacgtaacgggtttactgaagaagaagctctgaagcgcattcgttcacagtggcccagtgcggagaaagttaaaatggcagacgctgtcatcgacaataatggcaatattgaagaaacccgccgccagctgctggacattttacaccagtgggatctgctgggtaagggtggctccggccaccatcatcaccatcac

SEQ ID NO: 1140 - protein, 211 aa, synthetic construct
  REGION 1..211: note = Variant of 3'O-kinase
MAFTIGLTGGIAAGKSTVSAMMRELGLPVIDADEAARAVMKPGEEAYRQIVAAFGPGILRADGEIDRQKLGAIRFSDEQQRKMLNSIVGPAVLKKMLAEKEAHIRSGAKTVVLDIPLLFESGLTSWVDKVLVVYVDDDVQLRRLMARNGFTEEEALKRIRSQWPSAEKVKMADAVIDNNGNIEETRRQLLDILHQWDLLGKGGSGHHHHHH

SEQ ID NO: 1141 - DNA, 633 bp, synthetic construct
  misc_feature 1..633: note = Variant of 3'O-kinase
  source 1..633: mol_type = other DNA
atggcgtttaccattggtttaacaggagggatcgcagcgggcaaatcgactgtgagtgccatgatgcgtgaactgggtctgccggtcatcgatgctgacgaggcagcacgcgccgttatgaagccaggcgaagaagcgtatcgccaggttgtagctgcgttcggtccgggcattcttctggccgatggcgagatcgatcgccagaaactgggtcagatccgcttttcggacgaacaacaacgcaaggtgctgaatgcgattgtaggtcctgcagtcctgaagaagatgctcgctgagaaagaagctctgatccgctcaggcgccaagacggttgtgctggatatcccgctgctgttcgaatccggattgacccattgggtcgacaaagtgctcgtggtgtacgtcgatgatgatgttcagttacgccgccttatggcacgtaacgggtttactgaagaagaagctctgaagcgcattcgttcacagtggcccagtgcggagaaagttaaacgtgcagacgctgtcatcgacaataatggcaatattgaagaaacccgccgccagctgctggacattttacaccagtgggatctgctgggtaagggtggctccggccaccatcatcaccatcac

SEQ ID NO: 1142 - protein, 211 aa, synthetic construct
  REGION 1..211: note = Variant of 3'O-kinase
MAFTIGLTGGIAAGKSTVSAMMRELGLPVIDADEAARAVMKPGEEAYRQVVAAFGPGILLADGEIDRQKLGQIRFSDEQQRKVLNAIVGPAVLKKMLAEKEALIRSGAKTVVLDIPLLFESGLTHWVDKVLVVYVDDDVQLRRLMARNGFTEEEALKRIRSQWPSAEKVKRADAVIDNNGNIEETRRQLLDILHQWDLLGKGGSGHHHHHH

SEQ ID NO: 1143 - DNA, 633 bp, synthetic construct
  misc_feature 1..633: note = Variant of 3'O-kinase
  source 1..633: mol_type = other DNA
atggcgtttaccattggtttaacaggagggatcgcagcgggcaaatcgactgtgagtgccatgatgcgtgaactgggtctgccggtcatcgatgctgacgaggcagcacgcgccgttatgaagccaggcgaagaagcgtatcgccagattgtagctgcgttcggtccgggcattcttcgtgccgatggcgagatcgatcgccagaaactgggtgctatccgcttttcggacgaacaacaacgtaaggtgctgaattcgattgtaggtcctgcagtcctgaagaagatgctcgctgagaaagaagctcatatccgctcaggcgccaagacggttgtgctggatatcccgctgctgttcgaatccggattgacccattgggtcgacaaagtgctcgtggtgtacgtcgatgatgatgttcagttacgccgccttatggcacgtaacgggtttactgaagaagaagctctgaagcgcattcgttcacagtggcccagtgcggagaaagttaaacgtgcagacgctgtcatcgacaataatggcaatattgaagaaacccgccgccagctgctggccattttacaccagtgggatctgctggataagggtggctccggccaccatcatcaccatcac

SEQ ID NO: 1144 - protein, 211 aa, synthetic construct
  REGION 1..211: note = Variant of 3'O-kinase
MAFTIGLTGGIAAGKSTVSAMMRELGLPVIDADEAARAVMKPGEEAYRQIVAAFGPGILRADGEIDRQKLGAIRFSDEQQRKVLNSIVGPAVLKKMLAEKEAHIRSGAKTVVLDIPLLFESGLTHWVDKVLVVYVDDDVQLRRLMARNGFTEEEALKRIRSQWPSAEKVKRADAVIDNNGNIEETRRQLLAILHQWDLLDKGGSGHHHHHH

SEQ ID NO: 1145 - DNA, 633 bp, synthetic construct
  misc_feature 1..633: note = Variant of 3'O-kinase
  source 1..633: mol_type = other DNA
atggcggttaccattggtttaacaggagggatcgcagcgggcaaatcgactgtgagtgccatgatgcgtgaactgggtctgccggtcatcgatgctgacgaggcagcacgcgccgttatgaagccaggcgaagaagcgtatcgcgacattgtagctgcgttcggtccgggcattcttcgtgcggatggcgagatcgatcgccagaaactgggtgctatccgcttttcggacgaacaacaacgtaaggtgctggcttcgattgtaggtcctgcagtcctgaagaagatgctggctgagaaagaagctcatatcaagtcaggcgccaagacggttgtgctggatatcccgctgctgttcgaatccggattgcaatcgtgggtcgacaaagttctcgtggtgtacgtcgatgatgatgttcagttacgccgccttatggcacgtaacgggtttactgaagaagaagctctgaagcgcattcgttcacagtggcccagtgcggagaaagttaaacgtgcagacgctgtcatcgacaataatggcaatattgaagaaacccgccgccagctgctggacattttacaccagtgggatctgctggacaagggtggctccggccaccatcatcaccatcac

SEQ ID NO: 1146 - protein, 211 aa, synthetic construct
  REGION 1..211: note = Variant of 3'O-kinase
MAVTIGLTGGIAAGKSTVSAMMRELGLPVIDADEAARAVMKPGEEAYRDIVAAFGPGILRADGEIDRQKLGAIRFSDEQQRKVLASIVGPAVLKKMLAEKEAHIKSGAKTVVLDIPLLFESGLQSWVDKVLVVYVDDDVQLRRLMARNGFTEEEALKRIRSQWPSAEKVKRADAVIDNNGNIEETRRQLLDILHQWDLLDKGGSGHHHHHH

SEQ ID NO: 1147 - DNA, 633 bp, synthetic construct
  misc_feature 1..633: note = Variant of 3'O-kinase
  source 1..633: mol_type = other DNA
atggcggttaccattggtttaacaggagggatcgcagcgggcaaatcgactgtgagtgccatgatgcgtgaactgggtctgccggtcatcgatgctgacgaggcagcacgcgccgttatgaagccaggcgaagaagcgtatcgcgacattgtagctgcgttcggtccgggcattcttcgtgcggatggcgagatcgatcgccagaaactgggtgctatccgcttttcggacgaacaacaacgtaaggtgctgaattcgattgtaggtcctgcagtcctgaagaagatgctcgctgagaaggaagctcatatcgggtcaggcgccaagacggttgtgctggatatcccgctgctgttcgaatccggattgcaatcgtgggtcgacaaagttctcgtggtgtacgtcgatgatgatgttcagttacgccgccttatggcacgtaacgggtttactgaagaagaagctctgaagcgcattcgttcacagtggcccagtgcggagaaagttaaacgtgcagacgctgtcatcgacaataatggcaatattgaagaaacccgccgccagctgctggacattttacaccagtgggatctgctggaccacggtggctccggccaccatcatcaccatcac

SEQ ID NO: 1148 - protein, 211 aa, synthetic construct
  REGION 1..211: note = Variant of 3'O-kinase
MAVTIGLTGGIAAGKSTVSAMMRELGLPVIDADEAARAVMKPGEEAYRDIVAAFGPGILRADGEIDRQKLGAIRFSDEQQRKVLNSIVGPAVLKKMLAEKEAHIGSGAKTVVLDIPLLFESGLQSWVDKVLVVYVDDDVQLRRLMARNGFTEEEALKRIRSQWPSAEKVKRADAVIDNNGNIEETRRQLLDILHQWDLLDHGGSGHHHHHH

SEQ ID NO: 1149 - DNA, 633 bp, synthetic construct
  misc_feature 1..633: note = Variant of 3'O-kinase
  source 1..633: mol_type = other DNA
atggcggttaccattggtttaacaggagggatcgcagcgggcaaatcgactgtgagtgccatgatgcgtgaactgggtctgccggtcatcgatgctgacgaggcagcacgcgccgttatgaagccaggcgaagaagcgtatcgcgacattgtagctgcgttcggtccgggcattcttcgtgcggatggcgagatcgatcgccagaaactgggtgctatccgcttttcggacgaacaacaacgtaaggtgctgaattcgattgtaggtcctgcagtcctgaagaagatgctcgctgagaaagaagctcatatcaagtcaggcgccaagacggttgtgctggatatcccgctgctgttcgaatccggattgcaatcgtgggtcgacaaagttctcgtggtgtacgtcgatgatgatgttcagttacgccgccttatggcacgtaacgggtttactgaagaagaagctctgaagcgcattcgttcacagtggcccagtgcggagaaagttaagatggcagacgctgtcatcgacaataatggcaatattgaagaaacccgccgccagctgctggacattttacaccagtgggatctgctggactcgggtggctccggccaccatcatcaccatcac

SEQ ID NO: 1150 - protein, 211 aa, synthetic construct
  REGION 1..211: note = Variant of 3'O-kinase
MAVTIGLTGGIAAGKSTVSAMMRELGLPVIDADEAARAVMKPGEEAYRDIVAAFGPGILRADGEIDRQKLGAIRFSDEQQRKVLNSIVGPAVLKKMLAEKEAHIKSGAKTVVLDIPLLFESGLQSWVDKVLVVYVDDDVQLRRLMARNGFTEEEALKRIRSQWPSAEKVKMADAVIDNNGNIEETRRQLLDILHQWDLLDSGGSGHHHHHH

SEQ ID NO: 1151 - DNA, 633 bp, synthetic construct
  misc_feature 1..633: note = Variant of 3'O-kinase
  source 1..633: mol_type = other DNA
atggcggttaccattggtttaacaggagggatcgcagcgggcaaatcgactgtgagtgccatgatgcgtgaactgggtctgccggtcatcgatgctgacgaggcagcacgcgccgttatgaagccaggcgaagaagcgtatcgcgacattgtagctgcgttcggtccgggcattcttcgtgaagatggcgagatcgatcgccagaaactgggtgctatccgcttttcggacgaacaacaacgtaaggtgctgaattcgattgtaggtcctgcagtcctgaagaagatgctcgctgagaaagaagctcatatcaagtcaggcgccaagacggttgtgctggatatcccgctgctgttcgaatccggattgcaatcgtgggtcgacaaagttctcgtggtgtacgtcgatgatgatgttcagttacgccgccttatggcacgtaacgggtttactgaagaagaagctctgaagcgcattcgttcacagtggcccagtgcggagaaagttaaacgtgcagacgctgtcatcgacaataatggcaatattgaagaaacccgccgccagctgctggacattttacaccagtgggatctgctggacaagggtggctccggccaccatcatcaccatcac

SEQ ID NO: 1152 - protein, 211 aa, synthetic construct
  REGION 1..211: note = Variant of 3'O-kinase
MAVTIGLTGGIAAGKSTVSAMMRELGLPVIDADEAARAVMKPGEEAYRDIVAAFGPGILREDGEIDRQKLGAIRFSDEQQRKVLNSIVGPAVLKKMLAEKEAHIKSGAKTVVLDIPLLFESGLQSWVDKVLVVYVDDDVQLRRLMARNGFTEEEALKRIRSQWPSAEKVKRADAVIDNNGNIEETRRQLLDILHQWDLLDKGGSGHHHHHH

SEQ ID NO: 1153 - DNA, 633 bp, synthetic construct
  misc_feature 1..633: note = Variant of 3'O-kinase
  source 1..633: mol_type = other DNA
atggcggttaccattggtttaacaggagggatcgcagcgggcaaatcgactgtgagtgccatgatgcgtgaactgggtctgccggtcatcgatgctgacgaggcagctcgcgccgttatgaagccaggcgaagaagcgtatcgcgacattgtagctgcgttcggtccgggcattcttcgtgcggatggcgagatcgatcgccagaaactgggtgctatccgcttttcggacgaaggccaacgtaaggtgctgaattcgattgtaggtcctgcagtcctgaagaagatgctcgctgagaaagaagctcatatcaagtcaggcgccaagacggttgtgctggatatcccgctgctgttcgaatccggattgcaatcgatggtcgacaaagttctcgtggtgtacgtcgatgatgatgttcagttacgccgccttatggcacgtaacgggtttactgaagaagaagctctgaagcgcattcgttcacagtggcccagtgcggagaaagttaaacgtgcagacgctgtcatcgacaataatggcaatattgaagaaacccgccgccagctgctggacattttacaccagtgggatctgctggacaagggtggctgcggccaccatcatcaccatcac

SEQ ID NO: 1154 - protein, 211 aa, synthetic construct
  REGION 1..211: note = Variant of 3'O-kinase
MAVTIGLTGGIAAGKSTVSAMMRELGLPVIDADEAARAVMKPGEEAYRDIVAAFGPGILRADGEIDRQKLGAIRFSDEGQRKVLNSIVGPAVLKKMLAEKEAHIKSGAKTVVLDIPLLFESGLQSMVDKVLVVYVDDDVQLRRLMARNGFTEEEALKRIRSQWPSAEKVKRADAVIDNNGNIEETRRQLLDILHQWDLLDKGGCGHHHHHH

SEQ ID NO: 1155 - DNA, 633 bp, synthetic construct
  misc_feature 1..633: note = Variant of 3'O-kinase
  source 1..633: mol_type = other DNA
atggcggttaccattggtttaacaggagggatcgcagcgggcaaatcgactgtgagtgccatgatgcgtgaactgggtctgccggtcatcgatgctgacgaggcagcacgcgccgttatgaagccaggcgaagaagcgtatcgcgacattgtagctgcgttcggtccgggcattcttcgtgcggatggcgagatcgatcgccagaaactgggtgctatccgcttttcggacgaacaacaacgtaaggtgctgcgttcgattgtaggtcctgcagtcctgaagaagatgaacgctgagaaagaagctcatatcaagtcaggcgccaagacggttgtgctggatatcccgctgctgttcgaatccggattgcaatcgtgggtcgacaaagttctcgtggtgtacgtcgatgatgatgttcagttacgccgccttatggcacgtaacgggtttactgaagaagaagctctgaagcgcattcgttcacagtggcccagtgcggagaaagttaaacgtgcagacgctgtcatcgacaataatggcaatattgaagaaacccgccgccagctgctggacattttacaccagtgggatctgctggacaagggtggctccggccaccatcatcaccatcac

SEQ ID NO: 1156 - protein, 211 aa, synthetic construct
  REGION 1..211: note = Variant of 3'O-kinase
MAVTIGLTGGIAAGKSTVSAMMRELGLPVIDADEAARAVMKPGEEAYRDIVAAFGPGILRADGEIDRQKLGAIRFSDEQQRKVLRSIVGPAVLKKMNAEKEAHIKSGAKTVVLDIPLLFESGLQSWVDKVLVVYVDDDVQLRRLMARNGFTEEEALKRIRSQWPSAEKVKRADAVIDNNGNIEETRRQLLDILHQWDLLDKGGSGHHHHHH

SEQ ID NO: 1157 - DNA, 633 bp, synthetic construct
  misc_feature 1..633: note = Variant of 3'O-kinase
  source 1..633: mol_type = other DNA
atggcggttaccattggtttaacaggagggatcgcagcgggcaaatcgactgtgagtgccatgatgcgtgaactgggtctgccggtcatcgatgctgacgagatggcacgcgccgttatgaagccaggcgaagaagcgtatcgcgacgaagtagctgcgttcggtccgggcattcttcgtgcggatggcgagatcgatcgccagaaactgggtgctatccgcttttcggacgaacaacaacgtaaggtgctgaattcgattgtaggtcctgcagtcctgaagaagatgctcgctgagaaagaagctcatatcaagtcaggcgccaagacggttgtgctggatatcccgctgctgttcgaatccggattgcaatcgtgggtcgacaaagttctcgtggtgtacgtcgatgatgatgttcagttacgccgccttatggcacgtaacgggtttactgaagaagaagctctgaagcgcattcgttcacagtggcccagtgcggagaaagttaaacgtgcagacgctgtcatcgacaataatggcaatattgaagaaacccgccgccagctgctggacattttacaccagtgggatctgctggacaagggtggctccggccaccatcatcaccatcac

SEQ ID NO: 1158 - protein, 211 aa, synthetic construct
  REGION 1..211: note = Variant of 3'O-kinase
MAVTIGLTGGIAAGKSTVSAMMRELGLPVIDADEMARAVMKPGEEAYRDEVAAFGPGILRADGEIDRQKLGAIRFSDEQQRKVLNSIVGPAVLKKMLAEKEAHIKSGAKTVVLDIPLLFESGLQSWVDKVLVVYVDDDVQLRRLMARNGFTEEEALKRIRSQWPSAEKVKRADAVIDNNGNIEETRRQLLDILHQWDLLDKGGSGHHHHHH

SEQ ID NO: 1159 - DNA, 633 bp, synthetic construct
  misc_feature 1..633: note = Variant of 3'O-kinase
  source 1..633: mol_type = other DNA
atggcggttaccattggtttaacaggagggatcgcagatggcaaatcgactgtgagtgccatgatgcgtgaactgggtctgccggtcatcgatgctgacgaggcagcacgcgccgttatgaagccaggcgaagaagcgtatcgcgacattgtagctgcgttcggtccgggcattcttcgtgcggatggcgagatcgatcgccagaaactgggtgctatccgcttttcggacgaacaacaacgtaaggtgctgaattcgattgtaggtcctgcagtcctgaagaagatgctcgctgagaaagaagctcatatcaagtcaggcgccaagacggttgtgctggatatcccgctgctgttcgaatccggattgcaatcgtgggtcgacaaagttctcgtggtgtacgtcgatgatgatgttcagttacgccgccttatggcacgtaacgggtttactgaagaagaagctctgaagcgcattcgttcacagtggcccagtgcggagaaagttaaacgtgcagacgctgtcatcgacaataatggcaatattgaagaaacccgccgccagctgctggacattttacaccagtgggatctgctggacaagggtggctccggccaccatcatcaccatcac

SEQ ID NO: 1160 - protein, 211 aa, synthetic construct
  REGION 1..211: note = Variant of 3'O-kinase
MAVTIGLTGGIADGKSTVSAMMRELGLPVIDADEAARAVMKPGEEAYRDIVAAFGPGILRADGEIDRQKLGAIRFSDEQQRKVLNSIVGPAVLKKMLAEKEAHIKSGAKTVVLDIPLLFESGLQSWVDKVLVVYVDDDVQLRRLMARNGFTEEEALKRIRSQWPSAEKVKRADAVIDNNGNIEETRRQLLDILHQWDLLDKGGSGHHHHHH

SEQ ID NO: 1161 - DNA, 633 bp, synthetic construct
  misc_feature 1..633: note = Variant of 3'O-kinase
  source 1..633: mol_type = other DNA
atggcggttaccattggtattacaggagggatcgcagcgggcaaatcgactgtgagtgccatgatgcgtgaactgggtctgccggtcatcgatgctgacgaggcagcacgcgccgttatgaagccaggcgaagaagcgtatcgcgacattgtagctgcgttcggtccgggcattcttcgtgcggatggcgagatcgatcgccagaaactgggtgctatccgcttttcggacgaacaacaacgtaaggtgctgggttcgattgtaggtcctgcagtcctgaagaagatggcggctgagaaagaagctcatatcaagtcaggcgccaagacggttgtgctggatatcccgctgctgttcgaatccggattgcaatcgatggtcgacaaagttctcgtggtgtacgtcgatgatgatgttcagttacgccgccttatggcacgtaacgggtttactgaagaagaagctctgaagcgcattcgttcacagtggcccagtgcggagaaagttaaacgtgcagacgctgtcatcgacaataatggcaatattgaagaaacccgccgccagctgctggacattttacaccagtgggatctgctggacaagggtggctccggccaccatcatcaccatcac

SEQ ID NO: 1162 - protein, 211 aa, synthetic construct
  REGION 1..211: note = Variant of 3'O-kinase
MAVTIGITGGIAAGKSTVSAMMRELGLPVIDADEAARAVMKPGEEAYRDIVAAFGPGILRADGEIDRQKLGAIRFSDEQQRKVLGSIVGPAVLKKMAAEKEAHIKSGAKTVVLDIPLLFESGLQSMVDKVLVVYVDDDVQLRRLMARNGFTEEEALKRIRSQWPSAEKVKRADAVIDNNGNIEETRRQLLDILHQWDLLDKGGSGHHHHHH

SEQ ID NO: 1163 - DNA, 633 bp, synthetic construct
  misc_feature 1..633: note = Variant of 3'O-kinase
  source 1..633: mol_type = other DNA
atggcggttaccattggtttaacaggagggatcgcagcgggcaaatcgactgtgagtgccatgatgcgtgaactgggtctgccggtcatcgatgctgacgaggcagcacgcgccgttatgaagccaggcgaagaagcgtatcgcgacattgtagctgaattcggtccgggcacccttcgtgcggatggcgagatcgatcgccagaaactgggtgctatccgcttttcggacgaacaacaacgtaaggtgctgaattcgattgtaggtcctgcagtcctgaagaagatgctcgctgagcgtgaagctcatatcgggtcaggcgcctcgacggttgtgctggatatcccgctgctgttcgaatccggattgcaatcgtgggtcgacaaagttctcgtggtgtacgtcgatgatgatgttcagttacgccgccttatggcacgtaacgggtttactgaagaagaagctctgaagcgcattcgttcacagtggcccagtgcggagaaagttaaacgtgcagacgctgtcatcgacaataatggcaatattgaagaaacccgccgccagctgctggacattttacaccagtgggatctgctggacaagggtggctccggccaccatcatcaccatcac

SEQ ID NO: 1164 - protein, 211 aa, synthetic construct
  REGION 1..211: note = Variant of 3'O-kinase
MAVTIGLTGGIAAGKSTVSAMMRELGLPVIDADEAARAVMKPGEEAYRDIVAEFGPGTLRADGEIDRQKLGAIRFSDEQQRKVLNSIVGPAVLKKMLAEREAHIGSGASTVVLDIPLLFESGLQSWVDKVLVVYVDDDVQLRRLMARNGFTEEEALKRIRSQWPSAEKVKRADAVIDNNGNIEETRRQLLDILHQWDLLDKGGSGHHHHHH

SEQ ID NO: 1165 - DNA, 633 bp, synthetic construct
  misc_feature 1..633: note = Variant of 3'O-kinase
  source 1..633: mol_type = other DNA
atggcggttaccattggtttaacaggagggatcgcagctggcaaatcgactgtgagtgccatgatgcgtgaactgggtctgccggtcatcgatgctgacgaggcagcacgcgccgttatgaagccaggcgaagaagcgtatcgcgacatggtagctgcgttcggtccgggcattcttcgtgcggatggcgagatcgatcgccagaaactgggtgctatccgcttttcggacgcacaacaacgtaaggtgctgaattcgattgtaggtcctgcagtcctgaagaagatgctcgctgagaaagaagctcatatcaagtcaggcgccaagacggttgtgctggatatcccgctgctgttcgaatccgggttgcaaagttgggtcgacaaagttctcgtggtgtacgtcgatgatgatgttcagttagaccgccttatggcacgtaacgggtttactgaagaagaagctctgaagcgcattcgttcacagtggcccagtgcggagaaagttaaacgtgcagacgctgtcatcgacaataatggcaatattgaagaaacccgccgccagctgctggatattttacaccagtgggatctgctggacaagggtggctccggccaccatcatcaccatcac

SEQ ID NO: 1166 - protein, 211 aa, synthetic construct
  REGION 1..211: note = Variant of 3'O-kinase
MAVTIGLTGGIAAGKSTVSAMMRELGLPVIDADEAARAVMKPGEEAYRDMVAAFGPGILRADGEIDRQKLGAIRFSDAQQRKVLNSIVGPAVLKKMLAEKEAHIKSGAKTVVLDIPLLFESGLQSWVDKVLVVYVDDDVQLDRLMARNGFTEEEALKRIRSQWPSAEKVKRADAVIDNNGNIEETRRQLLDILHQWDLLDKGGSGHHHHHH

SEQ ID NO: 1167 - DNA, 633 bp, synthetic construct
  misc_feature 1..633: note = Variant of 3'O-kinase
  source 1..633: mol_type = other DNA
atggcggttaccattggtattacaggagggatcgcagcgggcaaatcgactgtgagtgccatgatgcgtgaactgggtctgccggtcatcgatgctgacgaggcagcacgcgccgttatgaagccaggcgaagaagcgtatcgcgacattgtagctgcgttcggtccgggcattcttcgtgcggatggcgagatcgatcgccagaaactgggtgctatccgcttttcggacgaacaacaacgtaaggtgctgaattcgattgtaggtcctgcagtcctgaagaagatgctcgctgagaaagaagctcatatcaagtcaggcgccaagacggttgtgctggatatcccgctgctgttcgaatccggattgcaatcgtgggtcgacaaagttctcgtggtgtacgtcgatgatgatgttcagttacgccgccttatggcacgtaacgggtttactgaagaagaagctctgaagcgcattcgttcacagtggcccagtgcggagaaagttaaacgtgcagacgctgtcatcgacaataatggcaatattgaagaaacccgccgccagctgctggacattttacaccagtgggatctgctggacaagggtggctccggccaccatcatcaccatcac

SEQ ID NO: 1168 - protein, 211 aa, synthetic construct
  REGION 1..211: note = Variant of 3'O-kinase
MAVTIGITGGIAAGKSTVSAMMRELGLPVIDADEAARAVMKPGEEAYRDIVAAFGPGILRADGEIDRQKLGAIRFSDEQQRKVLNSIVGPAVLKKMLAEKEAHIKSGAKTVVLDIPLLFESGLQSWVDKVLVVYVDDDVQLRRLMARNGFTEEEALKRIRSQWPSAEKVKRADAVIDNNGNIEETRRQLLDILHQWDLLDKGGSGHHHHHH

SEQ ID NO: 1169 - DNA, 633 bp, synthetic construct
  misc_feature 1..633: note = Variant of 3'O-kinase
  source 1..633: mol_type = other DNA
atggcggttaccattggtttaacaggagggatcgcagcgggcaaatcgactgtgggcgccatgatgcgtgaactgggtctgccggtcatcgatgctgacgaggcagcacgcgccgttatgaagccaggcgaagaagcgtatcgcgacattgtagctgcgttcggtccgggcattcttcgtgcggatggcgagatcgatcgccagaaactgggtgctatccgcttttcggacgaacaacaacgtaaggtgctgaattcgattgtaggtcctgcagtcctgaagaagatgctcgctgagcgtgaagctcatatcctgtcaggcgccaagacggttgtgctggatatcccgctgctgttcgaatccggattgcaatcgtgggtcgacaaagttctcgtggtgtacgtcgatgatgatgttcagttacgccgccttatggcacgtaacgggtttactgaagaagaagctctgaagcgcattcgttcacagtggcccagtgcggagaaagttaaacgtgcagacgctgtcatcgacaataatggcaatattgaagaaacccgccgccagctgctggacattttacaccagtgggatctgctggaccacggtggctccggccaccatcatcaccatcac

SEQ ID NO: 1170 - protein, 211 aa, synthetic construct
  REGION 1..211: note = Variant of 3'O-kinase
MAVTIGLTGGIAAGKSTVGAMMRELGLPVIDADEAARAVMKPGEEAYRDIVAAFGPGILRADGEIDRQKLGAIRFSDEQQRKVLNSIVGPAVLKKMLAEREAHILSGAKTVVLDIPLLFESGLQSWVDKVLVVYVDDDVQLRRLMARNGFTEEEALKRIRSQWPSAEKVKRADAVIDNNGNIEETRRQLLDILHQWDLLDHGGSGHHHHHH

SEQ ID NO: 1171 - DNA, 633 bp, synthetic construct
  misc_feature 1..633: note = Variant of 3'O-kinase
  source 1..633: mol_type = other DNA
atggcggttaccattggtttaacaggagggatcgcagcgggcaaatcgactgtgagcgccatgatgcgtgaactgggtctgccggtcatcgatgctgacgaggcagcacgcgccgttatgaagccaggcgaagaagcgtatcgcgacattgtagctgcgttcggtccgggcattcttcgtgcggatggcgagatcgatcgccagaaactgggtgctatccgcttttcggacgaacaacaacgtaaggtgctgaattcgattgtaggtcctgcagtcctgaagaagatgctcgctgagcgtgaagctcatatcaaatcaggcgccaagacggttgtgctggatatcccgctgctgttcgaatccggattgcaatcgtgggtcgacaaagttctcgtggtgtacgtcgatgatgatgttcagttacgccgccttatggcacgtaacgggtttactgaagaagaagctctgaagcgcattcgttcacagtggcccagtgcggagaaagttaaacgtgcagacgctgtcatcgacaataatggcaatattgaagaaacccgccgccagctgctggacattttacaccagtgggatctgctggacaagggtggctccggccaccatcatcaccatcac

SEQ ID NO: 1172 - protein, 211 aa, synthetic construct
  REGION 1..211: note = Variant of 3'O-kinase
MAVTIGLTGGIAAGKSTVSAMMRELGLPVIDADEAARAVMKPGEEAYRDIVAAFGPGILRADGEIDRQKLGAIRFSDEQQRKVLNSIVGPAVLKKMLAEREAHIKSGAKTVVLDIPLLFESGLQSWVDKVLVVYVDDDVQLRRLMARNGFTEEEALKRIRSQWPSAEKVKRADAVIDNNGNIEETRRQLLDILHQWDLLDKGGSGHHHHHH

SEQ ID NO: 1173 - DNA, 633 bp, synthetic construct
  misc_feature 1..633: note = Variant of 3'O-kinase
  source 1..633: mol_type = other DNA
atggcggttaccattggtctgacaggagggatcgcagcgggcaaatcgactgtgagtgccatgatgcgtgaactgggtctgccggtcatcgatgctgacgaggcagcacgcgccgttatgaagccaggcgaagaagcgtatcgcgacattgtagctgcgttcggtccgggcattcttcgtgcggatggcgagatcgatcgccagaaactgggtgctatccgcttttcggacgaacaacaacgtaaggtgctgaattcgattgtaggtcctgcagtcctgaagaagatgctcgctgagaaagaagctcatatcaagtcaggcgccaagacggttgtgctggatatcccgctgctgttcgaatccggattgcaatcgatggtcgacaaagttctcgtggtgtacgtcgatgatgatgttcagttacgccgccttatggcacgtaacgggtttactgaagaagaagctctgaagcgcattcgttcacagtggcccagtgcggagaaagttaaacgtgcagacgctgtcatcgacaataatggcaatattgaagaaacccgccgccagctgctggacattttacaccagtgggatctgctggacaagggtggctccggccaccatcatcaccatcac

SEQ ID NO: 1174 - protein, 211 aa, synthetic construct
  REGION 1..211: note = Variant of 3'O-kinase
MAVTIGLTGGIAAGKSTVSAMMRELGLPVIDADEAARAVMKPGEEAYRDIVAAFGPGILRADGEIDRQKLGAIRFSDEQQRKVLNSIVGPAVLKKMLAEKEAHIKSGAKTVVLDIPLLFESGLQSMVDKVLVVYVDDDVQLRRLMARNGFTEEEALKRIRSQWPSAEKVKRADAVIDNNGNIEETRRQLLDILHQWDLLDKGGSGHHHHHH

SEQ ID NO: 1175 - DNA, 633 bp, synthetic construct
  misc_feature 1..633: note = Variant of 3'O-kinase
  source 1..633: mol_type = other DNA
atggcggttaccattggtttaacaggagggatcgcagcgggcaaatcgactgtgggcgccatgatgcgtgaactgggtctgccggtcatcgatgctgacgaggcagcacgcgccgttatgaagccaggcgaagaagcgtatcgcgacattgtagctaacttcggtccgggcatccttcgtgcggatggcgagatcgatcgccagaaactgggtgctatccgcttttcggacgaacaacaacgtaaggtgctgaattcgattgtaggtcctgcagtcctgaagaagatgctcgctgagaaggaagctcatatcgggtcaggcgccaagacggttgtgctggatatcccgctgctgttcgaatccggattgcaatcgtgggtcgacaaagttctcgtggtgtacgtcgatgatgatgttcagttacgccgccttatggcacgtaacgggtttactgaagaagaagctctgaagcgcattcgttcacagtggcccagtgcggagaaagttaagcgtgcagacgctgtcatcgacaataatggcaatattgaagaaacccgccgccagctgctggacattttacaccagtgggatctgctggacaagggtggctccggccaccatcatcaccatcac

SEQ ID NO: 1176 - protein, 211 aa, synthetic construct
  REGION 1..211: note = Variant of 3'O-kinase
MAVTIGLTGGIAAGKSTVGAMMRELGLPVIDADEAARAVMKPGEEAYRDIVANFGPGILRADGEIDRQKLGAIRFSDEQQRKVLNSIVGPAVLKKMLAEKEAHIGSGAKTVVLDIPLLFESGLQSWVDKVLVVYVDDDVQLRRLMARNGFTEEEALKRIRSQWPSAEKVKRADAVIDNNGNIEETRRQLLDILHQWDLLDKGGSGHHHHHH

SEQ ID NO: 1177 - DNA, 633 bp, synthetic construct
  misc_feature 1..633: note = Variant of 3'O-kinase
  source 1..633: mol_type = other DNA
atggcggttaccattggtttaacaggagggatcgcagcgggcaaatcgactgtgagtgccatgatgcgtgaactgggtctgccggtcatcgatgctgacgaggcagcacgcgccgttatgaagccaggcgaagaagcgtatcgcgacattgtagctaacttcggtccgggcacccttcgtgcggatggcgagatcgatcgccagaaactgggtgctatccgcttttcggacgaacaacaacgtaaggtgctgaattcgattgtaggtcctgcagtcctgaagaagatgctcgctgagaaggaagctcatatcaaatcaggcgcctcgacggttgtgctggatatcccgctgctgttcgaatccggattgcaatcgtgggtcgacaaagttctcgtggtgtacgtcgatgatgatgttcagttacgccgccttatggcacgtaacgggtttactgaagaagaagctctgaagcgcattcgttcacagtggcccagtgcggagaaagttaaacgtgcagacgctgtcatcgacaataatggcaatattgaagaaacccgccgccagctgctggacattttacaccagtgggatctgctggactcgggtggctccggccaccatcatcaccatcac

SEQ ID NO: 1178 - protein, 211 aa, synthetic construct
  REGION 1..211: note = Variant of 3'O-kinase
MAVTIGLTGGIAAGKSTVSAMMRELGLPVIDADEAARAVMKPGEEAYRDIVANFGPGTLRADGEIDRQKLGAIRFSDEQQRKVLNSIVGPAVLKKMLAEKEAHIKSGASTVVLDIPLLFESGLQSWVDKVLVVYVDDDVQLRRLMARNGFTEEEALKRIRSQWPSAEKVKRADAVIDNNGNIEETRRQLLDILHQWDLLDSGGSGHHHHHH

SEQ ID NO: 1179 - DNA, 633 bp, synthetic construct
  misc_feature 1..633: note = Variant of 3'O-kinase
  source 1..633: mol_type = other DNA
atggcggttaccattggtttaacaggagggatcgcagcgggcaaatcgactgtgagtgccatgatgcgtgaactgggtctgccggtcatcgatgctgacgaggcagcacgcgccgttatgaagccaggcgaagaagcgtatcgcgacattgtagctgaattcggtccgggcatccttcgtgcggatggcgagatcgatcgccagaaactgggtgctatccgcttttcggacgaacaacaacgtaaggtgctgaattcgattgtaggtcctgcagtcctgaagaagatgctcgctgagtgggaagctcatatcgggtcaggcgccaagacggttgtgctggatatcccgctgctgttcgaatccggattgcaatcgtgggtcgacaaagttctcgtggtgtacgtcgatgatgatgttcagttacgccgccttatggcacgtaacgggtttactgaagaagaagctctgaagcgcattcgttcacagtggcccagtgcggagaaagttaaacgtgcagacgctgtcatcgacaataatggcaatattgaagaaacccgccgccagctgctggacattttacaccagtgggatctgctggacaagggtggctccggccaccatcatcaccatcac

SEQ ID NO: 1180 - protein, 211 aa, synthetic construct
  REGION 1..211: note = Variant of 3'O-kinase
MAVTIGLTGGIAAGKSTVSAMMRELGLPVIDADEAARAVMKPGEEAYRDIVAEFGPGILRADGEIDRQKLGAIRFSDEQQRKVLNSIVGPAVLKKMLAEWEAHIGSGAKTVVLDIPLLFESGLQSWVDKVLVVYVDDDVQLRRLMARNGFTEEEALKRIRSQWPSAEKVKRADAVIDNNGNIEETRRQLLDILHQWDLLDKGGSGHHHHHH

SEQ ID NO: 1181 - DNA, 633 bp, synthetic construct
  misc_feature 1..633: note = Variant of 3'O-kinase
  source 1..633: mol_type = other DNA
atggcggttaccattggtttaacaggagggatcgcagctggcaaatcgactgtgagtgccatgatgcgtgaactgggtctgccggtcatcgatgctgacgaggcagcacgcgccgttatgaagccaggcgaagaagcgtatcgcgacattgtagctgcgttcggtccgggcattcttcgtgcggatggcgagatcgatcgccagaaactgggtgctatccgcttttcggacgaacaacaacgtaaggtgctgaattcgattgtaggtcctgcagtcctgaagaagatgctcgctgagaaagaagctcatatcaagtcaggcgccaagacggttgtgctggatatcccgctgctgttcgaatccgggttgcaaagttgggtcgacaaagttctcgtggtgtacgtcgatgatgatgttcagttacgccgccttatggcacgtaacgggtttactgaagaagaagctctgaagcgcattcgttcacagtggcccagtgcggagaaagttaaacgtgcagacgctgtcatcgacaataatggcaatattgaagaaacccgccgccagctgctggatattttacaccagtgggatctgctggacaagggtggcatgggccaccatcatcaccatcac

SEQ ID NO: 1182 - protein, 211 aa, synthetic construct
  REGION 1..211: note = Variant of 3'O-kinase
MAVTIGLTGGIAAGKSTVSAMMRELGLPVIDADEAARAVMKPGEEAYRDIVAAFGPGILRADGEIDRQKLGAIRFSDEQQRKVLNSIVGPAVLKKMLAEKEAHIKSGAKTVVLDIPLLFESGLQSWVDKVLVVYVDDDVQLRRLMARNGFTEEEALKRIRSQWPSAEKVKRADAVIDNNGNIEETRRQLLDILHQWDLLDKGGMGHHHHHH

SEQ ID NO: 1183 - DNA, 633 bp, synthetic construct
  misc_feature 1..633: note = Variant of 3'O-kinase
  source 1..633: mol_type = other DNA
atggcggttaccattggtttaacaggagggatcgcagcgggcaaatcgactgtgagtgccatgatgcgtgaactgggtctgccggtcatcgatgctgacgaggcagcacgcgccgttatgaagccaggcgaagaagcgtatcgcgacattgtagctgcgttcggtccgggcattcttcgtgcagatggcgagatcgatcgccagaaactgggtgctatccgcttttcggacgaacaacaacgtaaggtgctgaattcgattgtaggtcctgcagtcctgaagaagatggcggctgagaaagaagctcatatcaagtcaggcgccaagacggttgtgctggatatcccgctgctgttcgaatccggattgcaatcgtgggtcgacaaagttctcgtggtgtacgtcgatgatgatgttcagttacgccgccttatggcacgtaacgggtttactgaagaagaagctctgaagcgcattcgttcacagtggcccagtgcggagaaagttaaacgtgcagacgctgtcatcgacaataatggcaatattgaagaaacccgccgccagctgctggacattttacaccagtgggatctgctggacaagggtggctccggccaccatcatcaccatcac

SEQ ID NO: 1184 - protein, 211 aa, synthetic construct
  REGION 1..211: note = Variant of 3'O-kinase
MAVTIGLTGGIAAGKSTVSAMMRELGLPVIDADEAARAVMKPGEEAYRDIVAAFGPGILRADGEIDRQKLGAIRFSDEQQRKVLNSIVGPAVLKKMAAEKEAHIKSGAKTVVLDIPLLFESGLQSWVDKVLVVYVDDDVQLRRLMARNGFTEEEALKRIRSQWPSAEKVKRADAVIDNNGNIEETRRQLLDILHQWDLLDKGGSGHHHHHH

SEQ ID NO: 1185 - DNA, 633 bp, synthetic construct
  misc_feature 1..633: note = Variant of 3'O-kinase
  source 1..633: mol_type = other DNA
atggcggttaccattggtagtacaggagggatcgcagcgggcaaatcgactgtgagtgccatgatgcgtgaactgggtctgcctgtcatcgatgctgacgaggcagcacgcgccgttatgaagccaggcgaagaagcgtatcgcgacattgtagctgcgttcggtccgggcattcttcgtgaagatggcgagatcgatcgccagaaactgggtgctatccgcttttcggacgaacaacaacgtaaggtgctgcgttcgattgtaggtcctgcagtcctgaagaagatggcggctgagaaagaagctcatatcaagtcaggcgccaagacggttgtgctggatatcccgctgctgttcgaatccggattgcaatcgatggtcgacaaagttctcgtggtgtacgtcgatgatgatgttcagttacgccgccttatggcacgtaacgggtttactgaagaagaagctctgaagcgcattcgttcacagtggcccagtgcggagaaagttaaacgtgcagacgctgtcatcgacaataatggcaatattgaagaaacccgccgccagctgctggacattttacaccagtgggatctgctggacaagggtggcagcggccaccatcatcaccatcac

SEQ ID NO: 1186 - protein, 211 aa, synthetic construct
  REGION 1..211: note = Variant of 3'O-kinase
MAVTIGSTGGIAAGKSTVSAMMRELGLPVIDADEAARAVMKPGEEAYRDIVAAFGPGILREDGEIDRQKLGAIRFSDEQQRKVLRSIVGPAVLKKMAAEKEAHIKSGAKTVVLDIPLLFESGLQSMVDKVLVVYVDDDVQLRRLMARNGFTEEEALKRIRSQWPSAEKVKRADAVIDNNGNIEETRRQLLDILHQWDLLDKGGSGHHHHHH

SEQ ID NO: 1187 - DNA, 633 bp, synthetic construct
  misc_feature 1..633: note = Variant of 3'O-kinase
  source 1..633: mol_type = other DNA
atggcggttaccattggtttaacaggagggatcgcagcgggcaaatcgactgtgagtgccatgatgcgtgaactgggtctgccggtcatcgatgctgacgaggcagctcgcgccgttatgaagccaggcgaagaagcgtatcgcgacattgtagctgcgttcggtccgggcattcttcgtgcggatggcgagatcgatcgccagaaactgggtgctatccgcttttcggacgaacaacaacgtaaggtgctgaattcgattgtaggtcctgcagtcctgaagaagatgctcgctgagaaagaagctcatatcaagtcaggcgccaagacggttgtgctggatatcccgctgctgttcgaatccggattgcaatcggctgtcgacaaagttctcgtggtgtacgtcgatgatgatgttcagttacgccgccttatggcacgtaacgggtttactgaagaagaagctctgaagcgcattcgttcacagtggcccagtgcggagaaagttaaacgtgcagacgctgtcatcgacaataatggcaatattgaagaaacccgccgccagctgctggacattttacaccagtgggatctgctggacaagggtggctccggccaccatcatcaccatcac

SEQ ID NO: 1188 - protein, 211 aa, synthetic construct
  REGION 1..211: note = Variant of 3'O-kinase
MAVTIGLTGGIAAGKSTVSAMMRELGLPVIDADEAARAVMKPGEEAYRDIVAAFGPGILRADGEIDRQKLGAIRFSDEQQRKVLNSIVGPAVLKKMLAEKEAHIKSGAKTVVLDIPLLFESGLQSAVDKVLVVYVDDDVQLRRLMARNGFTEEEALKRIRSQWPSAEKVKRADAVIDNNGNIEETRRQLLDILHQWDLLDKGGSGHHHHHH

SEQ ID NO: 1189 - DNA, 633 bp, synthetic construct
  misc_feature 1..633: note = Variant of 3'O-kinase
  source 1..633: mol_type = other DNA
atggcggttaccattggtttaacaggagggatcgcagcgggcaaatcgactgtgggcgccatgatgcgtgaactgggtctgccggtcatcgatgctgacgaggcagcacgcgccgttatgaagccaggcgaagaagcgtatcgcgacattgtagctgcgttcggtccgggcattcttcgtgcggatggcgagatcgatcgccagaaactgggtgctatccgcttttcggacgaacaacaacgtaaggtgctgaattcgattgtaggtcctgcagtcctgaagaagatgctcgctgagaaagaagctcatatcaagtcaggcgccaagacggttgtgctggatatcccgctgctgttcgaatccggattgcaatcgtgggtcgacaaagttctcgtggtgtacgtcgatgatgatgttcagttacgccgccttatggcacgtaacgggtttactgaagaagaagctctgaagcgcattcgttcacagtggcccagtgcggagaaagttaaacgtgcagacgctgtcatcgacaataatggcaatattgaagaaacccgccgccagctgctggacattttacaccagtgggatctgctggacaagggtggctccggccaccatcatcaccatcac

SEQ ID NO: 1190 - protein, 211 aa, synthetic construct
  REGION 1..211: note = Variant of 3'O-kinase
MAVTIGLTGGIAAGKSTVGAMMRELGLPVIDADEAARAVMKPGEEAYRDIVAAFGPGILRADGEIDRQKLGAIRFSDEQQRKVLNSIVGPAVLKKMLAEKEAHIKSGAKTVVLDIPLLFESGLQSWVDKVLVVYVDDDVQLRRLMARNGFTEEEALKRIRSQWPSAEKVKRADAVIDNNGNIEETRRQLLDILHQWDLLDKGGSGHHHHHH

SEQ ID NO: 1191 - DNA, 633 bp, synthetic construct
  misc_feature 1..633: note = Variant of 3'O-kinase
  source 1..633: mol_type = other DNA
atggcggttaccattggtttaacaggagggatcgcagcgggcaaatcgactgtgagtgccatgatgcgtgaactgggtctgcctgtcatcgattgggacgaggcagcacgcgccgttatgaagccaggcgaagaagcgtatcgcgacattgtagctgcgttcggtccgggcattcttcgtgcggatggcgagatcgatcgccagaaactgggtgctatccgcttttcggacgaacaacaacgtaaggtgctgcgttcgattgtaggtcctgcagtcctgaagaagatgctcgctgagaaagaagctcatatcaagtcaggcgccaagacggttgtgctggatatcccgctgctgttcgaatccggattgcaatcgggtgtcgacaaagttctcgtggtgtacgtcgatgatgatgttcagttacgccgccttatggcacgtaacgggtttactgaagaagaagctctgaagcgcattcgttcacagtggcccagtgcggagaaagttaaacgtgcagacgctgtcatcgacaataatggcaatattgaagaaacccgccgccagctgctggacattttacaccagtgggatctgctggacaagggtggctgcggccaccatcatcaccatcac

SEQ ID NO: 1192 - protein, 211 aa, synthetic construct
  REGION 1..211: note = Variant of 3'O-kinase
MAVTIGLTGGIAAGKSTVSAMMRELGLPVIDWDEAARAVMKPGEEAYRDIVAAFGPGILRADGEIDRQKLGAIRFSDEQQRKVLRSIVGPAVLKKMLAEKEAHIKSGAKTVVLDIPLLFESGLQSGVDKVLVVYVDDDVQLRRLMARNGFTEEEALKRIRSQWPSAEKVKRADAVIDNNGNIEETRRQLLDILHQWDLLDKGGCGHHHHHH

SEQ ID NO: 1193 - DNA, 633 bp, synthetic construct
  misc_feature 1..633: note = Variant of 3'O-kinase
  source 1..633: mol_type = other DNA
atggcggttaccattggtttaacaggagggatcgcagcgggcaaatcgactgtgggcgccatgatgcgtgaactgggtctgccggtcatcgatgctgacgaggcagcacgcgccgttatgaagccaggcgaagaagcgtatcgcgacattgtagctaacttcggtccgggcatccttcgtgcggatggcgagatcgatcgccagaaactgggtgctatccgcttttcggacgaacaacaacgtaaggtgctgaattcgattgtaggtcctgcagtcctgaagaagatgctcgctgagaaggaagctcatatcaaatcaggcgccaagacggttgtgctggatatcccgctgctgttcgaatccggattgcaatcgtgggtcgacaaagttctcgtggtgtacgtcgatgatgatgttcagttacgccgccttatggcacgtaacgggtttactgaagaagaagctctgaagcgcattcgttcacagtggcccagtgcggagaaagttaaacgtgcagacgctgtcatcgacaataatggcaatattgaagaaacccgccgccagctgctggacattttacaccagtgggatctgctggaccacggtggctccggccaccatcatcaccatcac

SEQ ID NO: 1194 - protein, 211 aa, synthetic construct
  REGION 1..211: note = Variant of 3'O-kinase
MAVTIGLTGGIAAGKSTVGAMMRELGLPVIDADEAARAVMKPGEEAYRDIVANFGPGILRADGEIDRQKLGAIRFSDEQQRKVLNSIVGPAVLKKMLAEKEAHIKSGAKTVVLDIPLLFESGLQSWVDKVLVVYVDDDVQLRRLMARNGFTEEEALKRIRSQWPSAEKVKRADAVIDNNGNIEETRRQLLDILHQWDLLDHGGSGHHHHHH

SEQ ID NO: 1195 - DNA, 633 bp, synthetic construct
  misc_feature 1..633: note = Variant of 3'O-kinase
  source 1..633: mol_type = other DNA
atggcggttaccattggtttaacaggagggatcgcagcgggcaaatcgactgtgagtgccatgatgcgtgaactgggtctgccggtcatcgatgctgacgaggcagcacgcgccgttatgaagccaggcgaagaagcgtatcgcgacattgtagctgcgttcggtccgggcattcttcgtgcggatggcgagatcgatcgccagaaactgggtgctatccgcttttcggacgaaggccaacgtaaggtgctgaattcgattgtaggtcctgcagtcctgaagaagatgctcgctgagaaagaagctcatatcaagtcaggcgccaagacggttgtgctggatatcccgctgctgttcgaatccggattgcaatcgtgggtcgacaaagttctcgtggtgtacgtcgatgatgatgttcagttacgccgccttatggcacgtaacgggtttactgaagaagaagctctgaagcgcattcgttcacagtggcccagtgcggagaaagttaaacgtgcagacgctgtcatcgacaataatggcaatattgaagaaacccgccgccagctgctggacattttacaccagtgggatctgctggacaagggtggctccggccaccatcatcaccatcac

SEQ ID NO: 1196 - protein, 211 aa, synthetic construct
  REGION 1..211: note = Variant of 3'O-kinase
MAVTIGLTGGIAAGKSTVSAMMRELGLPVIDADEAARAVMKPGEEAYRDIVAAFGPGILRADGEIDRQKLGAIRFSDEGQRKVLNSIVGPAVLKKMLAEKEAHIKSGAKTVVLDIPLLFESGLQSWVDKVLVVYVDDDVQLRRLMARNGFTEEEALKRIRSQWPSAEKVKRADAVIDNNGNIEETRRQLLDILHQWDLLDKGGSGHHHHHH

SEQ ID NO: 1197 - DNA, 633 bp, synthetic construct
  misc_feature 1..633: note = Variant of 3'O-kinase
  source 1..633: mol_type = other DNA
atggcggttaccattggtctgacaggagggatcgcagcgggcaaatcgactgtgagtgccatgatgcgtgaactgggtctgccggtcatcgatgctgacgaggcacgccgcgccgttatgaagccaggcgaagaagcgtatcgcgacattgtagctgcgttcggtccgggcattcttcgtgaagatggcgagatcgatcgccagaaactgggtgctatccgcttttcggacgaacaacaacgtaaggtgctgaattcgattgtaggtcctgcagtcctgaagaagatgctggctgagaaagaagctcatatcaagtcaggcgccaagacggttgtgctggatatcccgctgctgttcgaatccggattgcaatcgatggtcgacaaagttctcgtggtgtacgtcgatgatgatgttcagttacgccgccttatggcacgtaacgggtttactgaagaagaagctctgaagcgcattcgttcacagtggcccagtgcggagaaagttaaacgtgcagacgctgtcatcgacaataatggcaatattgaagaaacccgccgccagctgctggacattttacaccagtgggatctgctggacaagggtggctgcggccaccatcatcaccatcac

SEQ ID NO: 1198 - protein, 211 aa, synthetic construct
  REGION 1..211: note = Variant of 3'O-kinase
MAVTIGLTGGIAAGKSTVSAMMRELGLPVIDADEARRAVMKPGEEAYRDIVAAFGPGILREDGEIDRQKLGAIRFSDEQQRKVLNSIVGPAVLKKMLAEKEAHIKSGAKTVVLDIPLLFESGLQSMVDKVLVVYVDDDVQLRRLMARNGFTEEEALKRIRSQWPSAEKVKRADAVIDNNGNIEETRRQLLDILHQWDLLDKGGCGHHHHHH

SEQ ID NO: 1199 - DNA, 633 bp, synthetic construct
  misc_feature 1..633: note = Variant of 3'O-kinase
  source 1..633: mol_type = other DNA
atggcggttaccattggtttaacaggagggatcgcagcgggcaaatcgactgtgagtgccatgatgcgtgaactgggtctgactgtcatcgattgggacgaggcagctcgcgccgttatgaagccaggcgaagaagcgtatcgcgacattgtagctgcgttcggtccgggcattcttcgtgcggatggcgagatcgatcgccagaaactgggtgctatccgcttttcggacgaacaacaacgtaaggtgctgcgttcgattgtaggtcctgcagtcctgaagaagatgctcgctgagaaagaagctcatatcaagtcaggcgccaagacggttgtgctggatatcccgctgctgttcgaatccggattgcaatcgtgggtcgacaaagttctcgtggtgtacgtcgatgatgatgttcagttacgccgccttatggcacgtaacgggtttactgaagaagaagctctgaagcgcattcgttcacagtggcccagtgcggagaaagttaaacgtgcagacgctgtcatcgacaataatggcaatattgaagaaacccgccgccagctgctggacattttacaccagtgggatctgctggacaagggtggctccggccaccatcatcaccatcac

SEQ ID NO: 1200 - protein, 211 aa, synthetic construct
  REGION 1..211: note = Variant of 3'O-kinase
MAVTIGLTGGIAAGKSTVSAMMRELGLTVIDWDEAARAVMKPGEEAYRDIVAAFGPGILRADGEIDRQKLGAIRFSDEQQRKVLRSIVGPAVLKKMLAEKEAHIKSGAKTVVLDIPLLFESGLQSWVDKVLVVYVDDDVQLRRLMARNGFTEEEALKRIRSQWPSAEKVKRADAVIDNNGNIEETRRQLLDILHQWDLLDKGGSGHHHHHH

SEQ ID NO: 1201 - DNA, 633 bp, synthetic construct
  misc_feature 1..633: note = Variant of 3'O-kinase
  source 1..633: mol_type = other DNA
atggcggttaccattggtttaacaggagggatcgcagcgggcaaatcgactgtgagtgccatgatgcgtgaactgggtctgcctgtcatcgattgggacgaggcaggccgcgccgttatgaagccaggcgaagaagcgtatcgcgacattgtagctgcgttcggtccgggcattcttcgtgcggatggcgagatcgatcgccagaaactgggtgctatccgcttttcggacgaacaacaacgtaaggtgctgaattcgattgtaggtcctgcagtcctgaagaagatgctcgctgagaaagaagctcatatcaagtcaggcgccaagacggttgtgctggatatcccgctgctgttcgaatccggattgcaatcgatggtcgacaaagttctcgtggtgtacgtcgatgatgatgttcagttacgccgccttatggcacgtaacgggtttactgaagaagaagctctgaagcgcattcgttcacagtggcccagtgcggagaaagttaaacgtgcagacgctgtcatcgacaataatggcaatattgaagaaacccgccgccagctgctggacattttacaccagtgggatctgctggacaagggtggctccggccaccatcatcaccatcac

SEQ ID NO: 1202 - protein, 211 aa, synthetic construct
  REGION 1..211: note = Variant of 3'O-kinase
MAVTIGLTGGIAAGKSTVSAMMRELGLPVIDWDEAGRAVMKPGEEAYRDIVAAFGPGILRADGEIDRQKLGAIRFSDEQQRKVLNSIVGPAVLKKMLAEKEAHIKSGAKTVVLDIPLLFESGLQSMVDKVLVVYVDDDVQLRRLMARNGFTEEEALKRIRSQWPSAEKVKRADAVIDNNGNIEETRRQLLDILHQWDLLDKGGSGHHHHHH

SEQ ID NO: 1203 - DNA, 633 bp, synthetic construct
  misc_feature 1..633: note = Variant of 3'O-kinase
  source 1..633: mol_type = other DNA
atggcggttaccattggtttaacaggagggatcgcagcgggcaaatcgactgtgagtgccatgatgcgtgaactgggtctgactgtcatcgatgctgacgaggcacgccgcgccgttatgaagccaggcgaagaagcgtatcgcgacattgtagctgcgttcggtccgggcattcttcgtgaagatggcgagatcgatcgccagaaactgggtgctatccgcttttcggacgaacaacaacgtaaggtgctgaattcgattgtaggtcctgcagtcctgaagaagatgctcgctgagaaagaagctcatatcaagtcaggcgccaagacggttgtgctggatatcccgctgctgttcgaatccggattgcaatcgtgggtcgacaaagttctcgtggtgtacgtcgatgatgatgttcagttacgccgccttatggcacgtaacgggtttactgaagaagaagctctgaagcgcattcgttcacagtggcccagtgcggagaaagttaaacgtgcagacgctgtcatcgacaataatggcaatattgaagaaacccgccgccagctgctggacattttacaccagtgggatctgctggacaagggtggctccggccaccatcatcaccatcac

SEQ ID NO: 1204 - protein, 211 aa, synthetic construct
  REGION 1..211: note = Variant of 3'O-kinase
MAVTIGLTGGIAAGKSTVSAMMRELGLTVIDADEARRAVMKPGEEAYRDIVAAFGPGILREDGEIDRQKLGAIRFSDEQQRKVLNSIVGPAVLKKMLAEKEAHIKSGAKTVVLDIPLLFESGLQSWVDKVLVVYVDDDVQLRRLMARNGFTEEEALKRIRSQWPSAEKVKRADAVIDNNGNIEETRRQLLDILHQWDLLDKGGSGHHHHHH

SEQ ID NO: 1205 - DNA, 633 bp, synthetic construct
  misc_feature 1..633: note = Variant of 3'O-kinase
  source 1..633: mol_type = other DNA
atggcggttaccattggtttaacaggagggatcgcagcgggcaaatcgactgtgagtgccatgatgcgtgaactgggtctgactgtcatcgattgggacgaggcagctcgcgccgttatgaagccaggcgaagaagcgtatcgcgacattgtagctgcgttcggtccgggcattcttcgtgcggatggcgagatcgatcgccagaaactgggtgctatccgcttttcggacgaacaacaacgtaaggtgctgaattcgattgtaggtcctgcagtcctgaagaagatggcggctgagaaagaagctcatatcaagtcaggcgccaagacggttgtgctggatatcccgctgctgttcgaatccggattgcaatcgatggtcgacaaagttctcgtggtgtacgtcgatgatgatgttcagttacgccgccttatggcacgtaacgggtttactgaagaagaagctctgaagcgcattcgttcacagtggcccagtgcggagaaagttaaacgtgcagacgctgtcatcgacaataatggcaatattgaagaaacccgccgccagctgctggacattttacaccagtgggatctgctggacaagggtggctccggccaccatcatcaccatcac

SEQ ID NO: 1206 - protein, 211 aa, synthetic construct
  REGION 1..211: note = Variant of 3'O-kinase
MAVTIGLTGGIAAGKSTVSAMMRELGLTVIDWDEAARAVMKPGEEAYRDIVAAFGPGILRADGEIDRQKLGAIRFSDEQQRKVLNSIVGPAVLKKMAAEKEAHIKSGAKTVVLDIPLLFESGLQSMVDKVLVVYVDDDVQLRRLMARNGFTEEEALKRIRSQWPSAEKVKRADAVIDNNGNIEETRRQLLDILHQWDLLDKGGSGHHHHHH

SEQ ID NO: 1207 - DNA, 633 bp, synthetic construct
  misc_feature 1..633: note = Variant of 3'O-kinase
  source 1..633: mol_type = other DNA
atggcggttaccattggtctgacaggagggatcgcagcgggcaaatcgactgtgagtgccatgatgcgtgaactgggtctgcctgtcatcgattgggacgaggcaggccgcgccgttatgaagccaggcgaagaagcgtatcgcgacattgtagctgcgttcggtccgggcattcttcgtgaagatggcgagatcgatcgccagaaactgggtgctatccgcttttcggacgaacaacaacgtaaggtgctgggttcgattgtaggtcctgcagtcctgaagaagatgaacgctgagaaagaagctcatatcaagtcaggcgccaagacggttgtgctggatatcccgctgctgttcgaatccggattgcaatcgatggtcgacaaagttctcgtggtgtacgtcgatgatgatgttcagttacgccgccttatggcacgtaacgggtttactgaagaagaagctctgaagcgcattcgttcacagtggcccagtgcggagaaagttaaacgtgcagacgctgtcatcgacaataatggcaatattgaagaaacccgccgccagctgctggacattttacaccagtgggatctgctggacaagggtggctgcggccaccatcatcaccatcac

SEQ ID NO: 1208 - protein, 211 aa, synthetic construct
  REGION 1..211: note = Variant of 3'O-kinase
MAVTIGLTGGIAAGKSTVSAMMRELGLPVIDWDEAGRAVMKPGEEAYRDIVAAFGPGILREDGEIDRQKLGAIRFSDEQQRKVLGSIVGPAVLKKMNAEKEAHIKSGAKTVVLDIPLLFESGLQSMVDKVLVVYVDDDVQLRRLMARNGFTEEEALKRIRSQWPSAEKVKRADAVIDNNGNIEETRRQLLDILHQWDLLDKGGCGHHHHHH

SEQ ID NO: 1209 - DNA, 633 bp, synthetic construct
  misc_feature 1..633: note = Variant of 3'O-kinase
  source 1..633: mol_type = other DNA
atggcggttaccattggtttaacaggagggatcgcagcgggcaaatcgactgtgagtgccatgatgcgtgaactgggtctgccggtcatcgatgctgacgaggcagcacgcgccgttatgaagccaggcgaagaagcgtatcgcgacattgtagctgcgttcggtccgggcatccttcgtgcggatggcgagatcgatcgccagaaactgggtgctatccgcttttcggacgaacaacaacgtaaggtgctgaattcgattgtaggtcctgcagtcctgaagaagatgctcgctgagtgggaagctcatatcgcgtcaggcgccaagacggttgtgctggatatcccgctgctgttcgaatccggattgcaatcgtgggtcgacaaagttctcgtggtgtacgtcgatgatgatgttcagttacgccgccttatggcacgtaacgggtttactgaagaagaagctctgaagcgcattcgttcacagtggcccagtgcggagaaagttaaacgtgcagacgctgtcatcgacaataatggcaatattgaagaaacccgccgccagctgctggacattttacaccagtgggatctgctggacaagggtggctccggccaccatcatcaccatcac

SEQ ID NO: 1210 - protein, 211 aa, synthetic construct
  REGION 1..211: note = Variant of 3'O-kinase
MAVTIGLTGGIAAGKSTVSAMMRELGLPVIDADEAARAVMKPGEEAYRDIVAAFGPGILRADGEIDRQKLGAIRFSDEQQRKVLNSIVGPAVLKKMLAEWEAHIASGAKTVVLDIPLLFESGLQSWVDKVLVVYVDDDVQLRRLMARNGFTEEEALKRIRSQWPSAEKVKRADAVIDNNGNIEETRRQLLDILHQWDLLDKGGSGHHHHHH

SEQ ID NO: 1211 - DNA, 633 bp, synthetic construct
  misc_feature 1..633: note = Variant of 3'O-kinase
  source 1..633: mol_type = other DNA
atggcggttaccattggtttaacaggagggatcgcagcgggcaaatcgactgtgagtgccatgatgcgtgaactgggtctgactgtcatcgattgggacgaggcagctcgcgccgttatgaagccaggcgaagaagcgtatcgcgacattgtagctgcgttcggtccgggcattcttcgtgaagatggcgagatcgatcgccagaaactgggtgctatccgcttttcggacgaacaacaacgtaaggtgctgaattcgattgtaggtcctgcagtcctgaagaagatgctcgctgagaaagaagctcatatcaagtcaggcgccaagacggttgtgctggatatcccgctgctgttcgaatccggattgcaatcgtgggtcgacaaagttctcgtggtgtacgtcgatgatgatgttcagttacgccgccttatggcacgtaacgggtttactgaagaagaagctctgaagcgcattcgttcacagtggcccagtgcggagaaagttaaacgtgcagacgctgtcatcgacaataatggcaatattgaagaaacccgccgccagctgctggacattttacaccagtgggatctgctggacaagggtggcagcggccaccatcatcaccatcac

SEQ ID NO: 1212 - protein, 211 aa, synthetic construct
  REGION 1..211: note = Variant of 3'O-kinase
MAVTIGLTGGIAAGKSTVSAMMRELGLTVIDWDEAARAVMKPGEEAYRDIVAAFGPGILREDGEIDRQKLGAIRFSDEQQRKVLNSIVGPAVLKKMLAEKEAHIKSGAKTVVLDIPLLFESGLQSWVDKVLVVYVDDDVQLRRLMARNGFTEEEALKRIRSQWPSAEKVKRADAVIDNNGNIEETRRQLLDILHQWDLLDKGGSGHHHHHH

SEQ ID NO: 1213 - DNA, 633 bp, synthetic construct
  misc_feature 1..633: note = Variant of 3'O-kinase
  source 1..633: mol_type = other DNA
atggcggttaccattggtttaacaggagggatcgcagcgggcaaatcgactgtgagtgccatgatgcgtgaactgggtctgccggtcatcgatgctgacgaggcagcacgcgccgttatgaagccaggcgaagaagcgtatcgcgacattgtagctgcgttcggtccgggcattcttcgtgcggatggcgagatcgatcgccagaaactgggtgctatccgcttttcggacgaacaacaacgtaaggtgctgcgttcgattgtaggtcctgcagtcctgaagaagatgctggctgagaaagaagctcatatcaagtcaggcgccaagacggttgtgctggatatcccgctgctgttcgaatccggattgcaatcgatggtcgacaaagttctcgtggtgtacgtcgatgatgatgttcagttacgccgccttatggcacgtaacgggtttactgaagaagaagctctgaagcgcattcgttcacagtggcccagtgcggagaaagttaaacgtgcagacgctgtcatcgacaataatggcaatattgaagaaacccgccgccagctgctggacattttacaccagtgggatctgctggacaagggtggctccggccaccatcatcaccatcac

SEQ ID NO: 1214 - protein, 211 aa, synthetic construct
  REGION 1..211: note = Variant of 3'O-kinase
MAVTIGLTGGIAAGKSTVSAMMRELGLPVIDADEAARAVMKPGEEAYRDIVAAFGPGILRADGEIDRQKLGAIRFSDEQQRKVLRSIVGPAVLKKMLAEKEAHIKSGAKTVVLDIPLLFESGLQSMVDKVLVVYVDDDVQLRRLMARNGFTEEEALKRIRSQWPSAEKVKRADAVIDNNGNIEETRRQLLDILHQWDLLDKGGSGHHHHHH

SEQ ID NO: 1215 - DNA, 633 bp, synthetic construct
  misc_feature 1..633: note = Variant of 3'O-kinase
  source 1..633: mol_type = other DNA
atggcggttaccattggtttaacaggagggatcgcagcgggcaaatcgactgtgagtgccatgatgcgtgaactgggtctgactgtcatcgattgggacgaggcagctcgcgccgttatgaagccaggcgaagaagcgtatcgcgacattgtagctgcgttcggtccgggcattcttcgtgcggatggcgagatcgatcgccagaaactggttgctatccgcttttcggacgaaggccaacgtaaggtgctgaattcgattgtaggtcctgcagtcctgaagaagatggcggctgagaaagaagctcatatcaagtcaggcgccaagacggttgtgctggatatcccgctgctgttcgaatccggattgcaatcgatggtcgacaaagttctcgtggtgtacgtcgatgatgatgttcagttacgccgccttatggcacgtaacgggtttactgaagaagaagctctgaagcgcattcgttcacagtggcccagtgcggagaaagttaaacgtgcagacgctgtcatcgacaataatggcaatattgaagaaacccgccgccagctgctggacattttacaccagtgggatctgctggacaagggtggctgcggccaccatcatcaccatcac

SEQ ID NO: 1216 - protein, 211 aa, synthetic construct
  REGION 1..211: note = Variant of 3'O-kinase
MAVTIGLTGGIAAGKSTVSAMMRELGLTVIDWDEAARAVMKPGEEAYRDIVAAFGPGILRADGEIDRQKLVAIRFSDEGQRKVLNSIVGPAVLKKMAAEKEAHIKSGAKTVVLDIPLLFESGLQSMVDKVLVVYVDDDVQLRRLMARNGFTEEEALKRIRSQWPSAEKVKRADAVIDNNGNIEETRRQLLDILHQWDLLDKGGCGHHHHHH

SEQ ID NO: 1217 - DNA, 633 bp, synthetic construct
  misc_feature 1..633: note = Variant of 3'O-kinase
  source 1..633: mol_type = other DNA
atggcggttaccattggtttaacaggagggatcgcagcgggcaaatcgactgtgagtgccatgatgcgtgaactgggtctgccggtcatcgatgctgacgaggcagcacgcgccgttatgaagccaggcgaagaagcgtatcgcgacattgtagctgcgttcggtccgggcattcttcgtgcggatggcgagatcgatcgccagaaactgggtgctatccgcttttcggacgaacaacaacgtaaggtgctgaattcgattgtaggtcctgcagtcctgaagaagatgctcgctgagtgggaagctcatatcgggtcaggcgccaagacggttgtgctggatatcccgctgctgttcgaatccggattgcaatcgtgggtcgacaaagttctcgtggtgtacgtcgatgatgatgttcagttacgccgccttatggcacgtaacgggtttactgaagaagaagctctgaagcgcattcgttcacagtggcccagtgcggagaaagttaagcgtgcagacgctgtcatcgacaataatggcaatattgaagaaacccgccgccagctgctggacattttacaccagtgggatctgctggacaagggtggctccggccaccatcatcaccatcac

SEQ ID NO: 1218 - protein, 211 aa, synthetic construct
  REGION 1..211: note = Variant of 3'O-kinase
MAVTIGLTGGIAAGKSTVSAMMRELGLPVIDADEAARAVMKPGEEAYRDIVAAFGPGILRADGEIDRQKLGAIRFSDEQQRKVLNSIVGPAVLKKMLAEWEAHIGSGAKTVVLDIPLLFESGLQSWVDKVLVVYVDDDVQLRRLMARNGFTEEEALKRIRSQWPSAEKVKRADAVIDNNGNIEETRRQLLDILHQWDLLDKGGSGHHHHHH

SEQ ID NO: 1219 - DNA, 633 bp, synthetic construct
  misc_feature 1..633: note = Variant of 3'O-kinase
  source 1..633: mol_type = other DNA
atggcggttaccattggtattacaggagggatcgcagcgggcaaatcgactgtgagtgccatgatgcgtgaactgggtctgactgtcatcgattgggacgaggcagctcgcgccgttatgaagccaggcgaagaagcgtatcgcgacattgtagctgcgttcggtccgggcattcttcgtgcggatggcgagatcgatcgccagaaactgggtgctatccgcttttcggacgaacaacaacgtaaggtgctgaattcgattgtaggtcctgcagtcctgaagaagatgaacgctgagaaagaagctcatatcaagtcaggcgccaagacggttgtgctggatatcccgctgctgttcgaatccggattgcaatcgtgggtcgacaaagttctcgtggtgtacgtcgatgatgatgttcagttacgccgccttatggcacgtaacgggtttactgaagaagaagctctgaagcgcattcgttcacagtggcccagtgcggagaaagttaaacgtgcagacgctgtcatcgacaataatggcaatattgaagaaacccgccgccagctgctggacattttacaccagtgggatctgctggacaagggtggcagcggccaccatcatcaccatcac

SEQ ID NO: 1220 - protein, 211 aa, synthetic construct
  REGION 1..211: note = Variant of 3'O-kinase
MAVTIGITGGIAAGKSTVSAMMRELGLTVIDWDEAARAVMKPGEEAYRDIVAAFGPGILRADGEIDRQKLGAIRFSDEQQRKVLNSIVGPAVLKKMNAEKEAHIKSGAKTVVLDIPLLFESGLQSWVDKVLVVYVDDDVQLRRLMARNGFTEEEALKRIRSQWPSAEKVKRADAVIDNNGNIEETRRQLLDILHQWDLLDKGGSGHHHHHH

SEQ ID NO: 1221 - DNA, 633 bp, synthetic construct
  misc_feature 1..633: note = Variant of 3'O-kinase
  source 1..633: mol_type = other DNA
atggcggttaccattggtattacaggagggatcgcagcgggcaaatcgactgtgagtgccatgatgcgtgaactgggtctgccggtcatcgatgctgacgaggcagcacgcgccgttatgaagccaggcgaagaagcgtatcgcgacattgtagctgcgttcggtccgggcattcttcgtgaagatggcgagatcgatcgccagaaactgggtgctatccgcttttcggacgaacaacaacgtaaggtgctgaattcgattgtaggtcctgcagtcctgaagaagatgctggctgagaaagaagctcatatcaagtcaggcgccaagacggttgtgctggatatcccgctgctgttcgaatccggattgcaatcgtgggtcgacaaagttctcgtggtgtacgtcgatgatgatgttcagttacgccgccttatggcacgtaacgggtttactgaagaagaagctctgaagcgcattcgttcacagtggcccagtgcggagaaagttaaacgtgcagacgctgtcatcgacaataatggcaatattgaagaaacccgccgccagctgctggacattttacaccagtgggatctgctggacaagggtggctccggccaccatcatcaccatcac

SEQ ID NO: 1222 - protein, 211 aa, synthetic construct
  REGION 1..211: note = Variant of 3'O-kinase
MAVTIGITGGIAAGKSTVSAMMRELGLPVIDADEAARAVMKPGEEAYRDIVAAFGPGILREDGEIDRQKLGAIRFSDEQQRKVLNSIVGPAVLKKMLAEKEAHIKSGAKTVVLDIPLLFESGLQSWVDKVLVVYVDDDVQLRRLMARNGFTEEEALKRIRSQWPSAEKVKRADAVIDNNGNIEETRRQLLDILHQWDLLDKGGSGHHHHHH

SEQ ID NO: 1223 - DNA, 633 bp, synthetic construct
  misc_feature 1..633: note = Variant of 3'O-kinase
  source 1..633: mol_type = other DNA
atggcggttaccattggtttaacaggagggatcgcagcgggcaaatcgactgtgagtgccatgatgcgtgaactgggtctgccggtcatcgatgctgacgaggcagcacgcgccgttatgaagccaggcgaagaagcgtatcgcgacattgtagctgcgttcggtccgggcattcttcgtgcggatggcgagatcgatcgccagaaactgggtgctatctttttttcggacgaacaacaacgtaaggtgctgaattcgattgtaggtcctgcagtcctgaagaagatgctcgctgagaaagaagctcatatcaagtcaggcgccaagacggttgtgctggatatcccgctgctgttcgaatccggattgcaatcgtgggtcgacaaagttctcgtggtgtacgtcgatgatgatgttcagttacgccgccttatggcacgtaacgggtttactgaagaagaagctctgaagcgcattcgttcacagtggcccagtgcggagaaagttaaacgtgcagacgctgtcatcgacaataatggcaatattgaagaaacccgccgccagctgctggacattttacaccagtgggatctgctggacaagggtggctccggccaccatcatcaccatcac

SEQ ID NO: 1224 - protein, 211 aa, synthetic construct
  REGION 1..211: note = Variant of 3'O-kinase
MAVTIGLTGGIAAGKSTVSAMMRELGLPVIDADEAARAVMKPGEEAYRDIVAAFGPGILRADGEIDRQKLGAIFFSDEQQRKVLNSIVGPAVLKKMLAEKEAHIKSGAKTVVLDIPLLFESGLQSWVDKVLVVYVDDDVQLRRLMARNGFTEEEALKRIRSQWPSAEKVKRADAVIDNNGNIEETRRQLLDILHQWDLLDKGGSGHHHHHH

SEQ ID NO: 1225 - DNA, 633 bp, synthetic construct
  misc_feature 1..633: note = Variant of 3'O-kinase
  source 1..633: mol_type = other DNA
atggcggttaccattggtttaacaggagggatcgcagcgggcaaatcgactgtgagtgccatgatgcgtgaactgggtctgccggtcatcgatgctgacgaggcagcacgcgccgttatgaagccaggcgaagaagcgtatcgcgacattgtagctgcgttcggtccgggcattcttcgtgcggatggcgagatcgatcgccagaaactggctgctatccgcttttcggacgaacaacaacgtaaggtgctgaattcgattgtaggtcctgcagtcctgaagaagatgctcgctgagaaagaagctcatatcaagtcaggcgccaagacggttgtgctggatatcccgctgctgttcgaatccggattgcaatcgtgggtcgacaaagttctcgtggtgtacgtcgatgatgatgttcagttacgccgccttatggcacgtaacgggtttactgaagaagaagctctgaagcgcattcgttcacagtggcccagtgcggagaaagttaaacgtgcagacgctgtcatcgacaataatggcaatattgaagaaacccgccgccagctgctggacattttacaccagtgggatctgctggacaagggtggctccggccaccatcatcaccatcac

SEQ ID NO: 1226 - protein, 211 aa, synthetic construct
  REGION 1..211: note = Variant of 3'O-kinase
MAVTIGLTGGIAAGKSTVSAMMRELGLPVIDADEAARAVMKPGEEAYRDIVAAFGPGILRADGEIDRQKLAAIRFSDEQQRKVLNSIVGPAVLKKMLAEKEAHIKSGAKTVVLDIPLLFESGLQSWVDKVLVVYVDDDVQLRRLMARNGFTEEEALKRIRSQWPSAEKVKRADAVIDNNGNIEETRRQLLDILHQWDLLDKGGSGHHHHHH

SEQ ID NO: 1227 - DNA, 633 bp, synthetic construct
  misc_feature 1..633: note = Variant of 3'O-kinase
  source 1..633: mol_type = other DNA
atggcggttaccattggtttaacaggagggatcgcagcgggcaaatcgactgtgagtgccatgatgcgtgaactgggtctgccggtcatcgatgctgacgaggcagcacgcgccgttatgaagccaggcgaagaagcgtatcgcgacattgtagctgcgttcggtccgggcattcttcgtgcggatggcgagatcgatcgccagaaactgggtgctatccgcttttcggacgaacaacaacgtaaggtgctgaattcgattgtaggtcctgcagtcctgaagaagatgctcgctgagaaagaagctcatatcaagtcaggcgccaagacggttgtgctggatatcccgctgctgttcgaatccggattgcaatcgtgggtcgacaaagttctcgtggtgtacgtcgatgatgatgttcagttacgccgccttatggatcgtaacgggtttactgaagaagaagctctgaagcgcattcgttcacagtggcccagtgcggagaaagttaaacgtgcagacgctgtcatcgacaataatggcaatattgaagaaacccgccgccagctgctggacattttacaccagtgggatctgctggacaagggtggctccggccaccatcatcaccatcac

SEQ ID NO: 1228 - protein, 211 aa, synthetic construct
  REGION 1..211: note = Variant of 3'O-kinase
MAVTIGLTGGIAAGKSTVSAMMRELGLPVIDADEAARAVMKPGEEAYRDIVAAFGPGILRADGEIDRQKLGAIRFSDEQQRKVLNSIVGPAVLKKMLAEKEAHIKSGAKTVVLDIPLLFESGLQSWVDKVLVVYVDDDVQLRRLMDRNGFTEEEALKRIRSQWPSAEKVKRADAVIDNNGNIEETRRQLLDILHQWDLLDKGGSGHHHHHH

SEQ ID NO: 1229 - DNA, 633 bp, synthetic construct
  misc_feature 1..633: note = Variant of 3'O-kinase
  source 1..633: mol_type = other DNA
atggcggttaccattggtttaacaggagggatcgcagcgggcaaatcgactgtgagtgccatgatgcgtgaactgggtctgccggtcatcgatgctgacgaggcagcacgcgccgttatgaagccaggcgaagaagcgtatcgcgacattgtagctgcgttcggtccgggcattcttcgtgcggatggcgagatcgatcgccagaaactgggtgctatccgcttttcggacgaacaacaacgtaaggtgctgaattcgattgtaggtcctgcagtcctgaagaagatgctcgctgagaaagaagctcatatcaagtcaggcgccaagacggttgtgctggatatcccgctgctgttcgaatccggattgcaatcgtgggtcgacaaagttctcgtggtgtacgtcgatgatgatgttcagttacgccgccttatggcacgtaacgggtttactgaagaagaagctctgaagcgcattcgtgttcagtggcccagtgcggagaaagttaaacgtgcagacgctgtcatcgacaataatggcaatattgaagaaacccgccgccagctgctggacattttacaccagtgggatctgctggacaagggtggctccggccaccatcatcaccatcac

SEQ ID NO: 1230 - protein, 211 aa, synthetic construct
  REGION 1..211: note = Variant of 3'O-kinase
MAVTIGLTGGIAAGKSTVSAMMRELGLPVIDADEAARAVMKPGEEAYRDIVAAFGPGILRADGEIDRQKLGAIRFSDEQQRKVLNSIVGPAVLKKMLAEKEAHIKSGAKTVVLDIPLLFESGLQSWVDKVLVVYVDDDVQLRRLMARNGFTEEEALKRIRVQWPSAEKVKRADAVIDNNGNIEETRRQLLDILHQWDLLDKGGSGHHHHHH

SEQ ID NO: 1231 - DNA, 633 bp, synthetic construct
  misc_feature 1..633: note = Variant of 3'O-kinase
  source 1..633: mol_type = other DNA
atggcggttaccattggtttaacaggagggatcgcagcgggcaaatcgactgtgagtgccatgatgcgtgaactgggtctgccggtcatcgatgctgacgaggcagcacgcgccgttatgaagccaggcgaagaagcgtatcgcgacattgtagctgcgttcggtccgggcattcttcgtgcggatggcgagatcgatcgccagaaactgggtgctatccgcttttcggacgaacaacaacgtaaggtgctgaattcgattgtaggtcctgcagtcctgaagaagatgctcgctgagaaagaagctcatatcaagtcaggcgccaagacggttgtgctggattggccgctgctgttcgaatccggattgcaatcgtgggtcgacaaagttctcgtggtgtacgtcgatgatgatgttcagttacgccgccttatggcacgtaacgggtttactgaagaagaagctctgaagcgcattcgttcacagtggcccagtgcggagaaagttaaacgtgcagacgctgtcatcgacaataatggcaatattgaagaaacccgccgccagctgctggacattttacaccagtgggatctgctggacaagggtggctccggccaccatcatcaccatcac

SEQ ID NO: 1232 - protein, 211 aa, synthetic construct
  REGION 1..211: note = Variant of 3'O-kinase
MAVTIGLTGGIAAGKSTVSAMMRELGLPVIDADEAARAVMKPGEEAYRDIVAAFGPGILRADGEIDRQKLGAIRFSDEQQRKVLNSIVGPAVLKKMLAEKEAHIKSGAKTVVLDWPLLFESGLQSWVDKVLVVYVDDDVQLRRLMARNGFTEEEALKRIRSQWPSAEKVKRADAVIDNNGNIEETRRQLLDILHQWDLLDKGGSGHHHHHH

SEQ ID NO: 1233 - DNA, 633 bp, synthetic construct
  misc_feature 1..633: note = Variant of 3'O-kinase
  source 1..633: mol_type = other DNA
atggcggttaccattggtttaacaggagggatcgcagcgggcaaatcgactgtgagtgccatgatgcgtgaactgggtctgccggtcatcgatgctgacgaggcagcacgcgccgttatgaagccaggcgaagaagcgtatcgcgacattgtagctgcgttcggtccgggcattcttcgtgcggatggcgagatcgatcgccagaggctgggtgctatccgcttttcggacgaacaacaacgtaaggtgctgaattcgattgtaggtcctgcagtcctgaagaagatgctcgctgagaaagaagctcatatcaagtcaggcgccaagacggttgtgctggatatcccgctgctgttcgaatccggattgcaatcgtgggtcgacaaagttctcgtggtgtacgtcgatgatgatgttcagttacgccgccttatggcacgtaacgggtttactgaagaagaagctctgaagcgcattcgttcacagtggcccagtgcggagaaagttaaacgtgcagacgctgtcatcgacaataatggcaatattgaagaaacccgccgccagctgctggacattttacaccagtgggatctgctggacaagggtggctccggccaccatcatcaccatcac

SEQ ID NO: 1234 - protein, 211 aa, synthetic construct
  REGION 1..211: note = Variant of 3'O-kinase
MAVTIGLTGGIAAGKSTVSAMMRELGLPVIDADEAARAVMKPGEEAYRDIVAAFGPGILRADGEIDRQRLGAIRFSDEQQRKVLNSIVGPAVLKKMLAEKEAHIKSGAKTVVLDIPLLFESGLQSWVDKVLVVYVDDDVQLRRLMARNGFTEEEALKRIRSQWPSAEKVKRADAVIDNNGNIEETRRQLLDILHQWDLLDKGGSGHHHHHH

SEQ ID NO: 1235 - DNA, 633 bp, synthetic construct
  misc_feature 1..633: note = Variant of 3'O-kinase
  source 1..633: mol_type = other DNA
atggcggttaccattggtttaacaggagggatcgcagcgggcaaatcgactgtgagtgccatgatgcgtgaactgggtctgccggtcatcgatgctgacgaggcagcacgcgccgttatgaagccaggcgaagaagcgtatcgcgacattgtagctgcgttcggtccgggcattcttcgtgcggatggcgagatcgatcgccagaaactgggtgctatccgcttttcggacgaacaacaacgtaaggtgctgaattcgattgtaggtcctgcagtcctgaagaagatgctcgctgagaaagaagctcatatcaagtcaggcgccaagacggttgtgctggatatcccgctgctgttcgaatccggattgcaatcgtgggtcgacaaagttctcgtggtgtacgtcgatgatgatgttcagttacgccgccttatggcacgtaacgggtttactgaagaagaagctctgaagcgcattcgttcacagtggcccagtgcggagaaagttaaacgtgcagacgctgtcggggacaataatggcaatattgaagaaacccgccgccagctgctggacattttacaccagtgggatctgctggacaagggtggctccggccaccatcatcaccatcac

SEQ ID NO: 1236 - protein, 211 aa, synthetic construct
  REGION 1..211: note = Variant of 3'O-kinase
MAVTIGLTGGIAAGKSTVSAMMRELGLPVIDADEAARAVMKPGEEAYRDIVAAFGPGILRADGEIDRQKLGAIRFSDEQQRKVLNSIVGPAVLKKMLAEKEAHIKSGAKTVVLDIPLLFESGLQSWVDKVLVVYVDDDVQLRRLMARNGFTEEEALKRIRSQWPSAEKVKRADAVGDNNGNIEETRRQLLDILHQWDLLDKGGSGHHHHHH

SEQ ID NO: 1237 - DNA, 633 bp, synthetic construct
  misc_feature 1..633: note = Variant of 3'O-kinase
  source 1..633: mol_type = other DNA
atggcggttaccattggtttaacaggagggatcgcagcgggcaaatcgactgtgagtgccatgatgcgtgaactgggtctgccggtcatcgatgctgacgaggcagcacgcgccgttatgaagccaggcgaagaagcgtatcgcgacattgtagctgcgttcggtccgggcattcttcgtgcggatggcgagatcgatcgccagaaactgggtgctatccgcttttcggacgaacaacaacgtaaggtgctgaattcgattgtaggtcctgcagtcctgaagaagatgctcgctgagaaagaagctcatatcaagtcaggcgccaagacggttgtgctggatatcccgctgctgttcgaatccggattgcaatcgtgggtcgacaaagttctcgtggtgtacgtcgatgatgatgttcagttacgccgccttatggcacgtaacgggtttactgaagaagaagctctgaagcgcattctttcacagtggcccagtgcggagaaagttaaacgtgcagacgctgtcatcgacaataatggcaatattgaagaaacccgccgccagctgctggacattttacaccagtgggatctgctggacaagggtggctccggccaccatcatcaccatcac

SEQ ID NO: 1238 - protein, 211 aa, synthetic construct
  REGION 1..211: note = Variant of 3'O-kinase
MAVTIGLTGGIAAGKSTVSAMMRELGLPVIDADEAARAVMKPGEEAYRDIVAAFGPGILRADGEIDRQKLGAIRFSDEQQRKVLNSIVGPAVLKKMLAEKEAHIKSGAKTVVLDIPLLFESGLQSWVDKVLVVYVDDDVQLRRLMARNGFTEEEALKRILSQWPSAEKVKRADAVIDNNGNIEETRRQLLDILHQWDLLDKGGSGHHHHHH

SEQ ID NO: 1239 - DNA, 633 bp, synthetic construct
  misc_feature 1..633: note = Variant of 3'O-kinase
  source 1..633: mol_type = other DNA
atggcggttaccattggtttaacaggagggatcgcagcgggcaaatcgactgtgagtgccatgatgcgtgaactgggtctgccggtcatcgatgctgacgaggcagcacgcgccgttatgaagccaggcgaagaagcgtatcgcgacattgtagctgcgttcggtccgggcattcttcgtgcggatggcgagatcgatcgccagaaactgggtgctatccgcttttcggacgaacaacaacgtaaggtgctgaattcgattgtaggtcctgcagtcctgaagaagatgctcgctgagaaagaagctcatatcaagtcaggcgccaagacggttgtgctggatatcccgctgctgttcgaatccggattgcaatcgtgggtcgacaaagttctcgtggtgtacgtcgatgatgatgttcagttacgccgccttatggcacgtaacgggtttactgaagaagaagctctgaagcgcattcgttcacagtggcccagtgcggagaaagttaaacgtgcagacgctgtcctggacaataatggcaatattgaagaaacccgccgccagctgctggacattttacaccagtgggatctgctggacaagggtggctccggccaccatcatcaccatcac

SEQ ID NO: 1240 - protein, 211 aa, synthetic construct
  REGION 1..211: note = Variant of 3'O-kinase
MAVTIGLTGGIAAGKSTVSAMMRELGLPVIDADEAARAVMKPGEEAYRDIVAAFGPGILRADGEIDRQKLGAIRFSDEQQRKVLNSIVGPAVLKKMLAEKEAHIKSGAKTVVLDIPLLFESGLQSWVDKVLVVYVDDDVQLRRLMARNGFTEEEALKRIRSQWPSAEKVKRADAVLDNNGNIEETRRQLLDILHQWDLLDKGGSGHHHHHH

SEQ ID NO: 1241 - DNA, 633 bp, synthetic construct
  misc_feature 1..633: note = Variant of 3'O-kinase
  source 1..633: mol_type = other DNA
atggcggttaccattggtttaacaggagggatcgcagcgggcaaatcgactgtgagtgccatgatgcgtgaactgggtctgccggtcatcgatgctgacgaggcagcacgcgccgttatgaagccaggcgaagaagcgtatcgcgacattgtagctgcgttcggtccgggcattcttcgtgcggatggcgagatcgatcgccagaaactgattgctatccgcttttcggacgaacaacaacgtaaggtgctgaattcgattgtaggtcctgcagtcctgaagaagatgctcgctgagaaagaagctcatatcaagtcaggcgccaagacggttgtgctggatatcccgctgctgttcgaatccggattgcaatcgtgggtcgacaaagttctcgtggtgtacgtcgatgatgatgttcagttacgccgccttatggcacgtaacgggtttactgaagaagaagctctgaagcgcattcgttcacagtggcccagtgcggagaaagttaaacgtgcagacgctgtcatcgacaataatggcaatattgaagaaacccgccgccagctgctggacattttacaccagtgggatctgctggacaagggtggctccggccaccatcatcaccatcac

SEQ ID NO: 1242 - protein, 211 aa, synthetic construct
  REGION 1..211: note = Variant of 3'O-kinase
MAVTIGLTGGIAAGKSTVSAMMRELGLPVIDADEAARAVMKPGEEAYRDIVAAFGPGILRADGEIDRQKLIAIRFSDEQQRKVLNSIVGPAVLKKMLAEKEAHIKSGAKTVVLDIPLLFESGLQSWVDKVLVVYVDDDVQLRRLMARNGFTEEEALKRIRSQWPSAEKVKRADAVIDNNGNIEETRRQLLDILHQWDLLDKGGSGHHHHHH

SEQ ID NO: 1243 - DNA, 633 bp, synthetic construct
  misc_feature 1..633: note = Variant of 3'O-kinase
  source 1..633: mol_type = other DNA
atggcggttaccattggtttaacaggagggatcgcagcgggcaaatcgactgtgagtgccatgatgcgtgaactgggtctgccggtcatcgatgctgacgaggcagcacgcgccgttatgaagccaggcgaagaagcgtatcgcgacattgtagctgcgttcggtccgggcattcttcgtgcggatggcgagatcgatcgccagaaactgggtgctatccgcttttcggacgaacaacaacgtaaggtgctgaattcgattgtaggtcctgcagtcctgaagaagatgctcgctgagaaagaagctcatatcaagtcaggcgccaagacggttgtgctggatatcccgctgctgttcgaatccggattgcaatcgtgggtcgacaaagttctcgtggtgtacgtcgatgatgatgttcagttacgccgccttatggcacgtaacgggtttactgaagaagaagctctgaagcgcattcgttcacagtggcccagtgcggagaaagttaaacgtgcagacgctgtcatcgacaataatggcaatgaggaagaaacccgccgccagctgctggacattttacaccagtgggatctgctggacaagggtggctccggccaccatcatcaccatcac

SEQ ID NO: 1244 - protein, 211 aa, synthetic construct
  REGION 1..211: note = Variant of 3'O-kinase
MAVTIGLTGGIAAGKSTVSAMMRELGLPVIDADEAARAVMKPGEEAYRDIVAAFGPGILRADGEIDRQKLGAIRFSDEQQRKVLNSIVGPAVLKKMLAEKEAHIKSGAKTVVLDIPLLFESGLQSWVDKVLVVYVDDDVQLRRLMARNGFTEEEALKRIRSQWPSAEKVKRADAVIDNNGNEEETRRQLLDILHQWDLLDKGGSGHHHHHH

SEQ ID NO: 1245 - DNA, 633 bp, synthetic construct
  misc_feature 1..633: note = Variant of 3'O-kinase
  source 1..633: mol_type = other DNA
atggcggttaccattggtttaacaggagggatcgcagcgggcaaatcgactgtgagtgccatgatgcgtgaactgggtctgccggtcatcgatgctgacgaggcagcacgcgccgttatgaagccaggcgaagaagcgtatcgcgacattgtagctgcgttcggtccgggcattcttcgtgcggatggcgagatcgatcgccagaaactgggtgctatcattttttcggacgaacaacaacgtaaggtgctgaattcgattgtaggtcctgcagtcctgaagaagatgctcgctgagaaagaagctcatatcaagtcaggcgccaagacggttgtgctggatatcccgctgctgttcgaatccggattgcaatcgtgggtcgacaaagttctcgtggtgtacgtcgatgatgatgttcagttacgccgccttatggcacgtaacgggtttactgaagaagaagctctgaagcgcattcgttcacagtggcccagtgcggagaaagttaaacgtgcagacgctgtcatcgacaataatggcaatattgaagaaacccgccgccagctgctggacattttacaccagtgggatctgctggacaagggtggctccggccaccatcatcaccatcac

SEQ ID NO: 1246 - protein, 211 aa, synthetic construct
  REGION 1..211: note = Variant of 3'O-kinase
MAVTIGLTGGIAAGKSTVSAMMRELGLPVIDADEAARAVMKPGEEAYRDIVAAFGPGILRADGEIDRQKLGAIIFSDEQQRKVLNSIVGPAVLKKMLAEKEAHIKSGAKTVVLDIPLLFESGLQSWVDKVLVVYVDDDVQLRRLMARNGFTEEEALKRIRSQWPSAEKVKRADAVIDNNGNIEETRRQLLDILHQWDLLDKGGSGHHHHHH

SEQ ID NO: 1247 - DNA, 633 bp, synthetic construct
  misc_feature 1..633: note = Variant of 3'O-kinase
  source 1..633: mol_type = other DNA
atggcggttaccattggtttaacaggagggatcgcagcgggcaaatcgactgtgagtgccatgatgcgtgaactgggtctgccggtcatcgatgctgacgaggcagcacgcgccgttatgaagccaggcgaagaagcgtatcgcgacattgtagctgcgttcggtccgggcattcttcgtgcggatggcgagatcgatcgccagaaactgactgctatccgcttttcggacgaacaacaacgtaaggtgctgaattcgattgtaggtcctgcagtcctgaagaagatgctcgctgagaaagaagctcatatcaagtcaggcgccaagacggttgtgctggatatcccgctgctgttcgaatccggattgcaatcgtgggtcgacaaagttctcgtggtgtacgtcgatgatgatgttcagttacgccgccttatggcacgtaacgggtttactgaagaagaagctctgaagcgcattcgttcacagtggcccagtgcggagaaagttaaacgtgcagacgctgtcatcgacaataatggcaatattgaagaaacccgccgccagctgctggacattttacaccagtgggatctgctggacaagggtggctccggccaccatcatcaccatcac

SEQ ID NO: 1248 - protein, 211 aa, synthetic construct
  REGION 1..211: note = Variant of 3'O-kinase
MAVTIGLTGGIAAGKSTVSAMMRELGLPVIDADEAARAVMKPGEEAYRDIVAAFGPGILRADGEIDRQKLTAIRFSDEQQRKVLNSIVGPAVLKKMLAEKEAHIKSGAKTVVLDIPLLFESGLQSWVDKVLVVYVDDDVQLRRLMARNGFTEEEALKRIRSQWPSAEKVKRADAVIDNNGNIEETRRQLLDILHQWDLLDKGGSGHHHHHH

SEQ ID NO: 1249 - DNA, 633 bp, synthetic construct
  misc_feature 1..633: note = Variant of 3'O-kinase
  source 1..633: mol_type = other DNA
atggcggttaccattggtttaacaggagggatcgcagcgggcaaatcgactgtgagtgccatgatgcgtgaactgggtctgccggtcatcgatgctgacgaggcagcacgcgccgttatgaagccaggcgaagaagcgtatcgcgacattgtagctgcgttcggtccgggcattcttcgtgcggatggcgagatcgatcgccagaaactgtatgctatccgcttttcggacgaacaacaacgtaaggtgctgaattcgattgtaggtcctgcagtcctgaagaagatgctcgctgagaaagaagctcatatcaagtcaggcgccaagacggttgtgctggatatcccgctgctgttcgaatccggattgcaatcgtgggtcgacaaagttatcgtggtgtacgtcgatgatgatgttcagttacgccgccttatggcacgtaacgggtttactgaagaagaagctctgaagcgcattcgttcacagtggcccagtgcggagaaagttaaacgtgcagacgctgtcatcgacaataatggcaatattgaagaaacccgccgccagctgctggacattttacaccagtgggatctgctggacaagggtggctccggccaccatcatcaccatcac

SEQ ID NO: 1250 - protein, 211 aa, synthetic construct
  REGION 1..211: note = Variant of 3'O-kinase
MAVTIGLTGGIAAGKSTVSAMMRELGLPVIDADEAARAVMKPGEEAYRDIVAAFGPGILRADGEIDRQKLYAIRFSDEQQRKVLNSIVGPAVLKKMLAEKEAHIKSGAKTVVLDIPLLFESGLQSWVDKVIVVYVDDDVQLRRLMARNGFTEEEALKRIRSQWPSAEKVKRADAVIDNNGNIEETRRQLLDILHQWDLLDKGGSGHHHHHH

SEQ ID NO: 1251 - DNA, 633 bp, synthetic construct
  misc_feature 1..633: note = Variant of 3'O-kinase
  source 1..633: mol_type = other DNA
atggcggttaccattggtttaacaggagggatcgcagcgggcaaatcgactgtgagtgccatgatgcgtgaactgggtctgccggtcatcgatgctgacgaggcagcacgcgccgttatgaagccaggcgaagaagcgtatcgcgacattgtagctgcgttcggtccgggcattcttcgtgcggatggcgagatcgatcgccagaaactgggtgctatccgcttttcggacgaacaacaacgtaaggtgctgaattcgattgtaggtcctgcagtcctgaagaagatgctcgctgagaaagaagctcatatcaagtcaggcgccaagacggttgtgctggatatcccgctgctgttcgaatccggattgcaatcgtgggtcgacaaagttctcgtggtgtacgtcgatgatgatgttcagttacgccgccttatggcacgtaacgggtttactgaagaagaagctctgaagcgcattcgttcacagtggcccattgcggagaaagttaaacgtgcagacgctgtcatcgacaataatggcaatattgaagaaacccgccgccagctgctggacattttacaccagtgggatctgctggacaagggtggctccggccaccatcatcaccatcac

SEQ ID NO: 1252 - protein, 211 aa, synthetic construct
  REGION 1..211: note = Variant of 3'O-kinase
MAVTIGLTGGIAAGKSTVSAMMRELGLPVIDADEAARAVMKPGEEAYRDIVAAFGPGILRADGEIDRQKLGAIRFSDEQQRKVLNSIVGPAVLKKMLAEKEAHIKSGAKTVVLDIPLLFESGLQSWVDKVLVVYVDDDVQLRRLMARNGFTEEEALKRIRSQWPIAEKVKRADAVIDNNGNIEETRRQLLDILHQWDLLDKGGSGHHHHHH

SEQ ID NO: 1253 - DNA, 633 bp, synthetic construct
  misc_feature 1..633: note = Variant of 3'O-kinase
  source 1..633: mol_type = other DNA
atggcggttaccattggtttaacaggagggatcgcagcgggcaaatcgactgtgagtgccatgatgcgtgaactgggtctgccggtcatcgatgctgacgaggcagcacgcgccgttatgaagccaggcgaagaagcgtatcgcgacattgtagctgcgttcggtccgggcattcttcgtgcggatggcgagatcgatcgccagaaactgggtgctatccgcttttcggacgaacaacaacgtaaggtgctgaattcgattgtaggtcctgcagtcctgaagaagatgctcgctgagaaagaagcttttatcaagtcaggcgccaagacggttgtgctggatatcccgctgctgttcgaatccggattgcaatcgtgggtcgacaaagttctcgtggtgtacgtcgatgatgatgttcagttacgccgccttatggcacgtaacgggtttactgaagaagaagctctgaagcgcattcgttcacagtggcccagtgcggagaaagttaaacgtgcagacgctgtcatcgacaataatggcaatattgaagaaacccgccgccagctgctggacattttacaccagtgggatctgctggacaagggtggctccggccaccatcatcaccatcac

SEQ ID NO: 1254 - protein, 211 aa, synthetic construct
  REGION 1..211: note = Variant of 3'O-kinase
MAVTIGLTGGIAAGKSTVSAMMRELGLPVIDADEAARAVMKPGEEAYRDIVAAFGPGILRADGEIDRQKLGAIRFSDEQQRKVLNSIVGPAVLKKMLAEKEAFIKSGAKTVVLDIPLLFESGLQSWVDKVLVVYVDDDVQLRRLMARNGFTEEEALKRIRSQWPSAEKVKRADAVIDNNGNIEETRRQLLDILHQWDLLDKGGSGHHHHHH

SEQ ID NO: 1255 - DNA, 633 bp, synthetic construct
  misc_feature 1..633: note = Variant of 3'O-kinase
  source 1..633: mol_type = other DNA
atggcggttaccattggtttaacaggagggatcgcagcgggcaaatcgactgtgagtgccatgatgcgtgaactgggtctgccggtcatcgatgctgacgaggcagcacgcgccgttatgaagccaggcgaagaagcgtatcgcgacattgtagctgcgttcggtccgggcattcttcgtgcggatggcgagatcgatcgccagaaactgggtgctatccgcttttcggacgaacaacaacgtaaggtgctgaattcgattgtaggtcctgcagtcctgaagaagatgctcgctgagaaagaagctcatatcaagtcaggcgccaagacggttgtgctggatatcccgctgctgttcgaatccggattgcaatcgtgggtcgacaaagttctcgtggtgtacgtcgatgatgatgttcagcctcgccgccttatggcacgtaacgggtttactgaagaagaagctctgaagcgcattcgttcacagtggcccagtgcggagaaagttaaacgtgcagacgctgtcatcgacaataatggcaatattgaagaaacccgccgccagctgctggacattttacaccagtgggatctgctggacaagggtggctccggccaccatcatcaccatcac

SEQ ID NO: 1256 - protein, 211 aa, synthetic construct
  REGION 1..211: note = Variant of 3'O-kinase
MAVTIGLTGGIAAGKSTVSAMMRELGLPVIDADEAARAVMKPGEEAYRDIVAAFGPGILRADGEIDRQKLGAIRFSDEQQRKVLNSIVGPAVLKKMLAEKEAHIKSGAKTVVLDIPLLFESGLQSWVDKVLVVYVDDDVQPRRLMARNGFTEEEALKRIRSQWPSAEKVKRADAVIDNNGNIEETRRQLLDILHQWDLLDKGGSGHHHHHH

SEQ ID NO: 1257 - DNA, 633 bp, synthetic construct
  misc_feature 1..633: note = Variant of 3'O-kinase
  source 1..633: mol_type = other DNA
atggcggttaccattggtttaacaggagggatcgcagcgggcaaatcgactgtgagtgccatgatgcgtgaactgggtctgccggtcatcgatgctgacgaggcagcacgcgccgttatgaagccaggcgaagaagcgtatcgcgacattgtagctgcgttcggtccgggcattcttcgtgcggatggcgagatcgatcgccagaaactgggtgctatccgcttttcggacgaacaacaacgtaaggtgctgaattcgattgtaggtcctgcagtcctgaagaagatgctcgctgagaaagaagctcatatcaagtcaggcgccaagacggttgtgctggatatcccgctgctgttcgaatccggattgcaatcgtgggtcgacaaagttctcgtggtgtacgtcgatgatgatgttcagttacgccgccttatgactcgtaacgggtttactgaagaagaagctctgaagcgcattcgttcacagtggcccagtgcggagaaagttaaacgtgcagacgctgtcatcgacaataatggcaatattgaagaaacccgccgccagctgctggacattttacaccagtgggatctgctggacaagggtggctccggccaccatcatcaccatcac

SEQ ID NO: 1258 - protein, 211 aa, synthetic construct
  REGION 1..211: note = Variant of 3'O-kinase
MAVTIGLTGGIAAGKSTVSAMMRELGLPVIDADEAARAVMKPGEEAYRDIVAAFGPGILRADGEIDRQKLGAIRFSDEQQRKVLNSIVGPAVLKKMLAEKEAHIKSGAKTVVLDIPLLFESGLQSWVDKVLVVYVDDDVQLRRLMTRNGFTEEEALKRIRSQWPSAEKVKRADAVIDNNGNIEETRRQLLDILHQWDLLDKGGSGHHHHHH

SEQ ID NO: 1259 - DNA, 633 bp, synthetic construct
  misc_feature 1..633: note = Variant of 3'O-kinase
  source 1..633: mol_type = other DNA
atggcggttaccattggtttaacaggagggatcgcagcgggcaaatcgactgtgagtgccatgatgcgtgaactgggtctgccggtcatcgatgctgacgaggcagcacgcgccgttatgaagccaggcgaagaagcgtatcgcgacattgtagctgcgttcggtccgggcattcttcgtgcggatggcgagatcgatcgccagaaactgggtgctatccgcttttcggacgaacaacaacgtaaggtgctgaattcgattgtaggtcctgcagtcctgaagaagatgctcgctgagaaagaagctcatatcaagtcaggcgccaagacggttgtgctggatatcccgctgctgttcgaatccggattgcaatcgtgggtcgacaaagttctcgtggtgtacgtcgatgatgatgttcagttacgccgccttatgagtcgtaacgggtttactgaagaagaagctctgaagcgcattcgttcacagtggcccagtgcggagaaagttaaacgtgcagacgctgtcatcgacaataatggcaatattgaagaaacccgccgccagctgctggacattttacaccagtgggatctgctggacaagggtggctccggccaccatcatcaccatcac

SEQ ID NO: 1260 - protein, 211 aa, synthetic construct
  REGION 1..211: note = Variant of 3'O-kinase
MAVTIGLTGGIAAGKSTVSAMMRELGLPVIDADEAARAVMKPGEEAYRDIVAAFGPGILRADGEIDRQKLGAIRFSDEQQRKVLNSIVGPAVLKKMLAEKEAHIKSGAKTVVLDIPLLFESGLQSWVDKVLVVYVDDDVQLRRLMSRNGFTEEEALKRIRSQWPSAEKVKRADAVIDNNGNIEETRRQLLDILHQWDLLDKGGSGHHHHHH

SEQ ID NO: 1261 - DNA, 633 bp, synthetic construct
  misc_feature 1..633: note = Variant of 3'O-kinase
  source 1..633: mol_type = other DNA
atggcggttaccattggtttaacaggagggatcgcagcgggcaaatcgactgtgagtgccatgatgcgtgaactgggtctgccggtcatcgatgctgacgaggcagcacgcgccgttatgaagccaggcgaagaagcgtatcgcgacattgtagctgcgttcggtccgggcattcttcgtgcggatggcgagatcgatcgccagaaactgggtgctatccgcttttcggacgaacaacaacgtaaggtgctgaattcgattgtaggtcctgcagtcctgaagaagatgctcgctgagaaagaagctcatatcaagtcaggcgccaagacggttgtgctggatatcccgctgctgttcgaatccggattgcaatcgtgggtcgacaaagttctcgtggtgcttgtcgatgatgatgttcagttacgccgccttatggcacgtaacgggtttactgaagaagaagctctgaagcgcattcgttcacagtggcccagtgcggagaaagttaaacgtgcagacgctgtcatcgacaataatggcaatattgaagaaacccgccgccagctgctggacattttacaccagtgggatctgctggacaagggtggctccggccaccatcatcaccatcac

SEQ ID NO: 1262 - protein, 211 aa, synthetic construct
  REGION 1..211: note = Variant of 3'O-kinase
MAVTIGLTGGIAAGKSTVSAMMRELGLPVIDADEAARAVMKPGEEAYRDIVAAFGPGILRADGEIDRQKLGAIRFSDEQQRKVLNSIVGPAVLKKMLAEKEAHIKSGAKTVVLDIPLLFESGLQSWVDKVLVVLVDDDVQLRRLMARNGFTEEEALKRIRSQWPSAEKVKRADAVIDNNGNIEETRRQLLDILHQWDLLDKGGSGHHHHHH

SEQ ID NO: 1263 - DNA, 633 bp, synthetic construct
  misc_feature 1..633: note = Variant of 3'O-kinase
  source 1..633: mol_type = other DNA
atggcggttaccattggtttaacaggagggatcgcagcgggcaaatcgactgtgagtgccatgatgcgtgaactgggtctgccggtcatcgatgctgacgaggcagcacgcgccgttatgaagccaggcgaagaagcgtatcgcgacattgtagctgcgttcggtccgggcattcttcgtgcggatggcgagatcgatcgccagaaactgggtgctatccgcttttcggacgaacaacaacgtaaggtgctgaattcgattgtaggtcctgcagtcctgaagaagatgctcgctgagaaagaagctcatatcaagtcaggcgccaagacggttgtgctggatatcccgctgctgttcgaatccggattgcattcgtgggtcgacaaagttctcgtggtgtacgtcgatgatgatgttcagttacgccgccttatggcacgtaacgggtttactgaagaagaagctctgaagcgcattcgttcacagtggcccagtgcggagaaagttaaacgtgcagacgctgtcatcgacaataatggcaatattgaagaaacccgccgccagctgctggacattttacaccagtgggatctgctggacaagggtggctccggccaccatcatcaccatcac

SEQ ID NO: 1264 - protein, 211 aa, synthetic construct
  REGION 1..211: note = Variant of 3'O-kinase
MAVTIGLTGGIAAGKSTVSAMMRELGLPVIDADEAARAVMKPGEEAYRDIVAAFGPGILRADGEIDRQKLGAIRFSDEQQRKVLNSIVGPAVLKKMLAEKEAHIKSGAKTVVLDIPLLFESGLHSWVDKVLVVYVDDDVQLRRLMARNGFTEEEALKRIRSQWPSAEKVKRADAVIDNNGNIEETRRQLLDILHQWDLLDKGGSGHHHHHH

SEQ ID NO: 1265 - DNA, 633 bp, synthetic construct
  misc_feature 1..633: note = Variant of 3'O-kinase
  source 1..633: mol_type = other DNA
atggcggttaccattggtttaacaggagggatcgcagcgggcaaatcgactgtgagtgccatgatgcgtgaactgggtctgccggtcatcgatgctgacgaggcagcacgcgccgttatgaagccaggcgaagaagcgtatcgcgacattgtagctgcgttcggtccgggcattcttcgtgcggatggcgagatcgatcgccagaaactgggtgctatccgcttttcggacgaacaacaacgtaaggtgctgaattcgattgtaggtcctgcagtcactaagaagatgctcgctgagaaagaagctcatatcaagtcaggcgccaagacggttgtgctggatatcccgctgctgttcgaatccggattgcaatcgtgggtcgacaaagttctcgtggtgtacgtcgatgatgatgttcagttacgccgccttatggcacgtaacgggtttactgaagaagaagctctgaagcgcattcgttcacagtggcccagtgcggagaaagttaaacgtgcagacgctgtcatcgacaataatggcaatattgaagaaacccgccgccagctgctggacattttacaccagtgggatctgctggacaagggtggctccggccaccatcatcaccatcac

SEQ ID NO: 1266 - protein, 211 aa, synthetic construct
  REGION 1..211: note = Variant of 3'O-kinase
MAVTIGLTGGIAAGKSTVSAMMRELGLPVIDADEAARAVMKPGEEAYRDIVAAFGPGILRADGEIDRQKLGAIRFSDEQQRKVLNSIVGPAVTKKMLAEKEAHIKSGAKTVVLDIPLLFESGLQSWVDKVLVVYVDDDVQLRRLMARNGFTEEEALKRIRSQWPSAEKVKRADAVIDNNGNIEETRRQLLDILHQWDLLDKGGSGHHHHHH

SEQ ID NO: 1267 - DNA, 633 bp, synthetic construct
  misc_feature 1..633: note = Variant of 3'O-kinase
  source 1..633: mol_type = other DNA
atggcggttaccattggtttaacaggagggatcgcagcgggcaaatcgactgtgagtgccatgatgcgtgaactgggtctgccggtcatcgatgctgacgaggcagcacgcgccgttatgaagccaggcgaagaagcgtatcgcgacattgtagctgcgttcggtccgggcattcttcgtgcggatggcgagatcgatcgccagaaactgggtgctatccgcttttcggacgaacaacaacgtaaggtgctgaattcgattgtaggtcctgcagtcctgaagaagatgctcgctgagaaagaagctcatatcaagtcaggcgccaagacggttgtgctggatgtgccgctgctgttcgaatccggattgcaatcgtgggtcgacaaagttctcgtggtgtacgtcgatgatgatgttcagttacgccgccttatggcacgtaacgggtttactgaagaagaagctctgaagcgcattcgttcacagtggcccagtgcggagaaagttaaacgtgcagacgctgtcatcgacaataatggcaatattgaagaaacccgccgccagctgctggacattttacaccagtgggatctgctggacaagggtggctccggccaccatcatcaccatcac

SEQ ID NO: 1268 - protein, 211 aa, synthetic construct
  REGION 1..211: note = Variant of 3'O-kinase
MAVTIGLTGGIAAGKSTVSAMMRELGLPVIDADEAARAVMKPGEEAYRDIVAAFGPGILRADGEIDRQKLGAIRFSDEQQRKVLNSIVGPAVLKKMLAEKEAHIKSGAKTVVLDVPLLFESGLQSWVDKVLVVYVDDDVQLRRLMARNGFTEEEALKRIRSQWPSAEKVKRADAVIDNNGNIEETRRQLLDILHQWDLLDKGGSGHHHHHH

SEQ ID NO: 1269 - DNA, 633 bp, synthetic construct
  misc_feature 1..633: note = Variant of 3'O-kinase
  source 1..633: mol_type = other DNA
atggcggttaccattggtttaacaggagggatcgcagcgggcaaatcgactgtgagtgccatgatgcgtgaactgggtctgccggtcatcgatgctgacgaggcagcacgcgccgttatgaagccaggcgaagaagcgtatcgcgacattgtagctgcgttcggtccgggcattcttcgtgcggatggcgagatcgatcgccagaaactgggtgctatccgcttttcggacgaacaacaacgtaaggtgctgaattcgattgtaggtcctgcagtcctgaagagtatgctcgctgagaaagaagctcatatcaagtcaggcgccaagacggttgtgctggatatcccgctgctgttcgaatccggattgcaatcgtgggtcgacaaagttctcgtggtgtacgtcgatgatgatgttcagttacgccgccttatggcacgtaacgggtttactgaagaagaagctctgaagcgcattcgttcacagtggcccagtgcggagaaagttaaacgtgcagacgctgtcatcgacaataatggcaatattgaagaaacccgccgccagctgctggacattttacaccagtgggatctgctggacaagggtggctccggccaccatcatcaccatcac

SEQ ID NO: 1270 - protein, 211 aa, synthetic construct
  REGION 1..211: note = Variant of 3'O-kinase
MAVTIGLTGGIAAGKSTVSAMMRELGLPVIDADEAARAVMKPGEEAYRDIVAAFGPGILRADGEIDRQKLGAIRFSDEQQRKVLNSIVGPAVLKSMLAEKEAHIKSGAKTVVLDIPLLFESGLQSWVDKVLVVYVDDDVQLRRLMARNGFTEEEALKRIRSQWPSAEKVKRADAVIDNNGNIEETRRQLLDILHQWDLLDKGGSGHHHHHH

SEQ ID NO: 1271 - DNA, 633 bp, synthetic construct
  misc_feature 1..633: note = Variant of 3'O-kinase
  source 1..633: mol_type = other DNA
atggcggttaccattggtttaacaggagggatcgcagcgggcaaatcgactgtgagtgccatgatgcgtgaactgggtctgccggtcatcgatgctgacgaggcagcacgcgccgttatgaagccaggcgaagaagcgtatcgcgacattgtagctgcgttcggtccgggcattcttcgtgcggatggcgagatcgatcgccagaaactgggtgctatccgcttttcggacgaacaacaacgtaaggtgctgaattcgattgtaggtcctgcagtcctgaagaagatgctcgctgagaaagaagctcatatcaagtcaggcgccaagacggttgtgctggatatcccgctgctgttcgaatccggattgcaatcgtgggtcgacaaagttctcgtggtgtacgtcgatgatgatgttcagttacgccgccttatggcacgtaacgggtttactgaagaagaagctcctaagcgcattcgttcacagtggcccagtgcggagaaagttaaacgtgcagacgctgtcatcgacaataatggcaatattgaagaaacccgccgccagctgctggacattttacaccagtgggatctgctggacaagggtggctccggccaccatcatcaccatcac

SEQ ID NO: 1272 - protein, 211 aa, synthetic construct
  REGION 1..211: note = Variant of 3'O-kinase
MAVTIGLTGGIAAGKSTVSAMMRELGLPVIDADEAARAVMKPGEEAYRDIVAAFGPGILRADGEIDRQKLGAIRFSDEQQRKVLNSIVGPAVLKKMLAEKEAHIKSGAKTVVLDIPLLFESGLQSWVDKVLVVYVDDDVQLRRLMARNGFTEEEAPKRIRSQWPSAEKVKRADAVIDNNGNIEETRRQLLDILHQWDLLDKGGSGHHHHHH

SEQ ID NO: 1273 - DNA, 633 bp, synthetic construct
  misc_feature 1..633: note = Variant of 3'O-kinase
  source 1..633: mol_type = other DNA
atggcggttaccattggtttaacaggagggatcgcagcgggcaaatcgactgtgagtgccatgatgcgtgaactgggtctgccggtcatcgatgctgacgaggcagcacgcgccgtgatgaagccaggcgaagaagcgtatcgcgacattgtagctgcgttcggtccgggcattcttcgtgcggatggcgagatcgatcgccagaaactgggtgctatccgcttttcggacgaacaacaacgtaaggtgctgaattcgattgtaggtcctgcagtcctgaagaagatgctcgctgagaaagaagctcatatcaagtcaggcgccaagacggttgtgctggatatcccgctgctgttcgaatccggattgcaatcgtgggtcgacaaagttctcgtggtgtacgtcgatgatgatgttcagttacgccgccttatggcacgtaacgggtttactgaagaagaagctctgaagcacattcgttcacagtggcccagtgcggagaaagttaaacgtgcagacgctgtcatcgacaataatggcaatattgaagaaacccgccgccagctgctggacattttacaccagtgggatctgctggacaagggtggctccggccaccatcatcaccatcac

SEQ ID NO: 1274 - protein, 211 aa, synthetic construct
  REGION 1..211: note = Variant of 3'O-kinase
MAVTIGLTGGIAAGKSTVSAMMRELGLPVIDADEAARAVMKPGEEAYRDIVAAFGPGILRADGEIDRQKLGAIRFSDEQQRKVLNSIVGPAVLKKMLAEKEAHIKSGAKTVVLDIPLLFESGLQSWVDKVLVVYVDDDVQLRRLMARNGFTEEEALKHIRSQWPSAEKVKRADAVIDNNGNIEETRRQLLDILHQWDLLDKGGSGHHHHHH

SEQ ID NO: 1275 - DNA, 633 bp, synthetic construct
  misc_feature 1..633: note = Variant of 3'O-kinase
  source 1..633: mol_type = other DNA
atggcggttaccattggtttaacaggagggatcgcagcgggcaaatcgactgtgagtgccatgatgcgtgaactgggtctgccggtcatcgatgctgacgaggcagcacgcgccgttatgaagccaggcgaagaagcgtatcgcgacattgtagctgcgttcggtccgggcattcttcgtgcggatggcgagatcgatcgccagaaactgggtgctatccgcttttcggacgaacaacaacgtaaggtgctgaattcgattgtaggtcctgcagtcctgaagaagatgctcgctgagaaagaagctcatatcaagtcaggcgccaagacggttgtgctggatatcccgctgctgttcgaatccggattgcaatcgtgggtcgacaaagttctcgtggtgtacgtcgatgatgatgttcagttacgccgccttatggcacgtaacgggtttactgaagaagaagctctgaagcgcattcgttcacagtggccccaggcggagaaagttaaacgtgcagacgctgtcatcgacaataatggcaatattgaagaaacccgccgccagctgctggacattttacaccagtgggatctgctggacaagggtggctccggccaccatcatcaccatcac

SEQ ID NO: 1276 - protein, 211 aa, synthetic construct
  REGION 1..211: note = Variant of 3'O-kinase
MAVTIGLTGGIAAGKSTVSAMMRELGLPVIDADEAARAVMKPGEEAYRDIVAAFGPGILRADGEIDRQKLGAIRFSDEQQRKVLNSIVGPAVLKKMLAEKEAHIKSGAKTVVLDIPLLFESGLQSWVDKVLVVYVDDDVQLRRLMARNGFTEEEALKRIRSQWPQAEKVKRADAVIDNNGNIEETRRQLLDILHQWDLLDKGGSGHHHHHH

SEQ ID NO: 1277 - DNA, 633 bp, synthetic construct
  misc_feature 1..633: note = Variant of 3'O-kinase
  source 1..633: mol_type = other DNA
atggcggttaccattggtttaacaggagggatcgcagcgggcaaatcgactgtgagtgccatgatggcggaactgggtctgccggtcatcgatgctgacgaggcagcacgcgccgttatgaagccaggcgaagaagcgtatcgcgacattgtagctgcgttcggtccgggcattcttcgtgcggatggcgagatcgatcgccagaaactgggtgctatccgcttttcggacgaacaacaacgtaaggtgctgaattcgattgtaggtcctgcagtcctgaagaagatgctcgctgagaaagaagctcatatcaagtcaggcgccaagacggttgtgctggatatcccgctgctgttcgaatccggattgcaatcgtgggtcgacaaagttctcgtggtgtacgtcgatgatgatgttcagttacgccgccttatggcacgtaacgggtttactgaagaagaagctctgaagcgcattcgttcacagtggcccagtgcggagaaagttaaacgtgcagacgctgtcatcgacaataatggcaatattgaagaaacccgccgccagctgctggacattttacaccagtgggatctgctggacaagggtggctccggccaccatcatcaccatcac

SEQ ID NO: 1278 - protein, 211 aa, synthetic construct
  REGION 1..211: note = Variant of 3'O-kinase
MAVTIGLTGGIAAGKSTVSAMMAELGLPVIDADEAARAVMKPGEEAYRDIVAAFGPGILRADGEIDRQKLGAIRFSDEQQRKVLNSIVGPAVLKKMLAEKEAHIKSGAKTVVLDIPLLFESGLQSWVDKVLVVYVDDDVQLRRLMARNGFTEEEALKRIRSQWPSAEKVKRADAVIDNNGNIEETRRQLLDILHQWDLLDKGGSGHHHHHH

SEQ ID NO: 1279 - DNA, 633 bp, synthetic construct
  misc_feature 1..633: note = Variant of 3'O-kinase
  source 1..633: mol_type = other DNA
atggcggttaccattggtttaacaggagggatcgcagcgggcaaatcgactgtgagtgccatgatgcgtgaactgggtctgccggtcatcgatgctgacgaggcagcacgcgccgttatgaagccaggcgaagaagcgtatcgcgacattgtagctgcgttcggtccgggcattcttcgtgcggggggcgagatcgatcgccagaaactgggtgctatccgcttttcggacgaacaacaacgtaaggtgctgaattcgattgtaggtcctgcagtcctgaagaagatgctcgctgagaaagaagctcatatcaagtcaggcgccaagacggttgtgctggatatcccgctgctgttcgaatccggattgcaatcgtgggtcgacaaagttctcgtggtgtacgtcgatgatgatgttcagttacgccgccttatggcacgtaacgggtttactgaagaagaagctctgaagcgcattcgttcacagtggcccagtgcggagaaagttaaacgtgcagacgctgtcatcgacaataatggcaatattgaagaaacccgccgccagctgctggacattttacaccagtgggatctgctggacaagggtggctccggccaccatcatcaccatcac

SEQ ID NO: 1280 - protein, 211 aa, synthetic construct
  REGION 1..211: note = Variant of 3'O-kinase
MAVTIGLTGGIAAGKSTVSAMMRELGLPVIDADEAARAVMKPGEEAYRDIVAAFGPGILRAGGEIDRQKLGAIRFSDEQQRKVLNSIVGPAVLKKMLAEKEAHIKSGAKTVVLDIPLLFESGLQSWVDKVLVVYVDDDVQLRRLMARNGFTEEEALKRIRSQWPSAEKVKRADAVIDNNGNIEETRRQLLDILHQWDLLDKGGSGHHHHHH

SEQ ID NO: 1281 - DNA, 633 bp, synthetic construct
  misc_feature 1..633: note = Variant of 3'O-kinase
  source 1..633: mol_type = other DNA
atggcggttaccattggtttaacaggagggatcgcagcgggcaaatcgactgtgagtgccatgatgcgtgaactgggtctgccggtcatcgatgctgacgaggcagcacgcgccgttatgaagccaggcgaagaagcgtatcgcgacattgtagctgcgttcggtccgggcattcttcgtgcggatggcgagatcgatcgccagaaactgggtgctatccgcttttcggacgaacaacaacgtaaggtgctgaattcgattgtaggtcctgcagtcctgaagaagatgctcgctgagaaagaagctcatatcaagtcaggcgccaagacggttgtgctggatatcccgctgctgttcgaatccggattgcaatcgtgggtcgacaaagttctcgtggtgtacgtcgatgatgatgttcagttacgccgccttatggcacgtaacgggtttactgaagaagaagctctgatgcgcattcgttcacagtggcccagtgcggagaaagttaaacgtgcagacgctgtcatcgacaataatggcaatattgaagaaacccgccgccagctgctggacattttacaccagtgggatctgctggacaagggtggctccggccaccatcatcaccatcac

SEQ ID NO: 1282 - protein, 211 aa, synthetic construct
  REGION 1..211: note = Variant of 3'O-kinase
MAVTIGLTGGIAAGKSTVSAMMRELGLPVIDADEAARAVMKPGEEAYRDIVAAFGPGILRADGEIDRQKLGAIRFSDEQQRKVLNSIVGPAVLKKMLAEKEAHIKSGAKTVVLDIPLLFESGLQSWVDKVLVVYVDDDVQLRRLMARNGFTEEEALMRIRSQWPSAEKVKRADAVIDNNGNIEETRRQLLDILHQWDLLDKGGSGHHHHHH

SEQ ID NO: 1283 - DNA, 633 bp, synthetic construct
  misc_feature 1..633: note = Variant of 3'O-kinase
  source 1..633: mol_type = other DNA
atggcggttaccattggtttaacaggagggatcgcagcgggcaaatcgactgtgagtgccatgatgcgtgaactgggtctgccggtcatcgatgctgacgaggcagcacgcgccgttatgaagccaggcgaagaagcgtatcgcgacattgtagctgcgttcggtccgggcattcttcgtgcggatggcgagatcgatcgccagaaactgggtaatatccgcttttcggacgaacaacaacgtaaggtgctgaattcgattgtaggtcctgcagtcctgaagaagatgctcgctgagaaagaagctcatatcaagtcaggcgccaagacggttgtgctggatatcccgctgctgttcgaatccggattgcaatcgtgggtcgacaaagttctcgtggtgtacgtcgatgatgatgttcagttacgccgccttatggcacgtaacgggtttactgaagaagaagctctgaagcgcattcgttcacagtggcccagtgcggagaaagttaaacgtgcagacgctgtcatcgacaataatggcaatattgaagaaacccgccgccagctgctggacattttacaccagtgggatctgctggacaagggtggctccggccaccatcatcaccatcac

SEQ ID NO: 1284 - protein, 211 aa, synthetic construct
  REGION 1..211: note = Variant of 3'O-kinase
MAVTIGLTGGIAAGKSTVSAMMRELGLPVIDADEAARAVMKPGEEAYRDIVAAFGPGILRADGEIDRQKLGNIRFSDEQQRKVLNSIVGPAVLKKMLAEKEAHIKSGAKTVVLDIPLLFESGLQSWVDKVLVVYVDDDVQLRRLMARNGFTEEEALKRIRSQWPSAEKVKRADAVIDNNGNIEETRRQLLDILHQWDLLDKGGSGHHHHHH

SEQ ID NO: 1285 - DNA, 633 bp, synthetic construct
  misc_feature 1..633: note = Variant of 3'O-kinase
  source 1..633: mol_type = other DNA
atggcggttaccattggtttaacaggagggatcgcagcgggcaaatcgactgtgagtgccatgatgcgtgaactgggttttccggtcatcgatgctgacgaggcagcacgcgccgttatgaagccaggcgaagaagcgtatcgcgacattgtagctgcgttcggtccgggcattcttcgtgcggatggcgagatcgatcgccagaaactgggtgctatccgcttttcggacgaacaacaacgtaaggtgctgaattcgattgtaggtcctgcagtcctgaagaagatgctcgctgagaaagaagctcatatcaagtcaggcgccaagacggttgtgctggatatcccgctgctgttcgaatccggattgcaatcgtgggtcgacaaagttctcgtggtgtacgtcgatgatgatgttcagttacgccgccttatggcacgtaacgggtttactgaagaagaagctctgaagcgcattcgttcacagtggcccagtgcggagaaagttaaacgtgcagacgctgtcatcgacaataatggcaatattgaagaaacccgccgccagctgctggacattttacaccagtgggatctgctggacaagggtggctccggacaccatcatcaccatcac

SEQ ID NO: 1286 - protein, 211 aa, synthetic construct
  REGION 1..211: note = Variant of 3'O-kinase
MAVTIGLTGGIAAGKSTVSAMMRELGFPVIDADEAARAVMKPGEEAYRDIVAAFGPGILRADGEIDRQKLGAIRFSDEQQRKVLNSIVGPAVLKKMLAEKEAHIKSGAKTVVLDIPLLFESGLQSWVDKVLVVYVDDDVQLRRLMARNGFTEEEALKRIRSQWPSAEKVKRADAVIDNNGNIEETRRQLLDILHQWDLLDKGGSGHHHHHH

SEQ ID NO: 1287 - DNA, 633 bp, synthetic construct
  misc_feature 1..633: note = Variant of 3'O-kinase
  source 1..633: mol_type = other DNA
atggcggttaccattggtttaacaggagggatcgcagcgggcaaatcgactgtgagtgccatgatgcgtgaactgggtctgccggtcatcgatgctgacgaggcagcacgcgccgttatgaagccaggcgaagaagcgtatcgcgacattgtagctgcgttcggtccgggcattcttcgtgcggatggcgagatcgatcgccagaaactgggtgctatccgcttttcggacgaacaacaacgtaaggtgctgaattcgattgtaggtcctgcagtcctgaagaagatgctcgctgagaaagaagctgttatcaagtcaggcgccaagacggttgtgctggatatcccgctgctgttcgaatccggattgcaatcgtgggtcgacaaagttctcgtggtgtacgtcgatgatgatgttcagttacgccgccttatggcacgtaacgggtttactgaagaagaagctctgaagcgcattcgttcacagtggcccagtgcggagaaagttaaacgtgcagacgctgtcatcgacaataatggcaatattgaagaaacccgccgccagctgctggacattttacaccagtgggatctgctggacaagggtggctccggccaccatcatcaccatcac

SEQ ID NO: 1288 - protein, 211 aa, synthetic construct
  REGION 1..211: note = Variant of 3'O-kinase
MAVTIGLTGGIAAGKSTVSAMMRELGLPVIDADEAARAVMKPGEEAYRDIVAAFGPGILRADGEIDRQKLGAIRFSDEQQRKVLNSIVGPAVLKKMLAEKEAVIKSGAKTVVLDIPLLFESGLQSWVDKVLVVYVDDDVQLRRLMARNGFTEEEALKRIRSQWPSAEKVKRADAVIDNNGNIEETRRQLLDILHQWDLLDKGGSGHHHHHH

SEQ ID NO: 1289 - DNA, 633 bp, synthetic construct
  misc_feature 1..633: note = Variant of 3'O-kinase
  source 1..633: mol_type = other DNA
atggcggttaccattggtttaacaggagggatcgcagcgggcaaatcgactgtgagtgccatgatgcgtgaactgggtctgccggtcatcgatgctgacgaggcagcacgcgccgttatgaagccaggcgaagaagcgtatcgcgacattgtagctgcgttcggtccgggcattcttcgtgcggatggcgagatcgatcgccagaaactgggtgatatccgcttttcggacgaacaacaacgtaaggtgctgaattcgattgtaggtcctgcagtcctgaagaagatgctcgctgagaaagaagctcatatcaagtcaggcgccaagacggttgtgctggatatcccgctgctgttcgaatccggattgcaatcgtgggtcgacaaagttctcgtggtgtacgtcgatgatgatgttcagttacgccgccttatggcacgtaacgggtttactgaagaagaagctctgaagcgcattcgttcacagtggcccagtgcggagaaagttaaacgtgcagacgctgtcatcgacaataatggcaatattgaagaaacccgccgccagctgctggacattttacaccagtgggatctgctggacaagggtggctccggccaccatcatcaccatcac

SEQ ID NO: 1290 - protein, 211 aa, synthetic construct
  REGION 1..211: note = Variant of 3'O-kinase
MAVTIGLTGGIAAGKSTVSAMMRELGLPVIDADEAARAVMKPGEEAYRDIVAAFGPGILRADGEIDRQKLGDIRFSDEQQRKVLNSIVGPAVLKKMLAEKEAHIKSGAKTVVLDIPLLFESGLQSWVDKVLVVYVDDDVQLRRLMARNGFTEEEALKRIRSQWPSAEKVKRADAVIDNNGNIEETRRQLLDILHQWDLLDKGGSGHHHHHH

SEQ ID NO: 1291 - DNA, 633 bp, synthetic construct
  misc_feature 1..633: note = Variant of 3'O-kinase
  source 1..633: mol_type = other DNA
atggcggttaccattggtttaacaggagggatcgcagcgggcaaatcgactgtgagtgccatgatgcgtgaactgggtctgccggtcatcgatgctgacgaggcagcacgcgccgttatgaagccaggcgaagaagcgtatcgcgacattgtagctgcgttcggtccgggcattcttcgtgcggatggcgagatcgatcgccagaaactgggtgctatccgcttttcggacgaacaacaacgtaaggtgctgaattcgattgtaggtcctgcagtcctgaagaagatgctcgctgagaaagaagctcatatcaagtcaggcgccaagacggttgtgctggatatcccggggctgttcgaatccggattgcaatcgtgggtcgacaaagttctcgtggtgtacgtcgatgatgatgttcagttacgccgccttatggcacgtaacgggtttactgaagaagaagctctgaagcgcattcgttcacagtggcccagtgcggagaaagttaaacgtgcagacgctgtcatcgacaataatggcaatattgaagaaacccgccgccagctgctggacattttacaccagtgggatctgctggacaagggtggctccggccaccatcatcaccatcac

SEQ ID NO: 1292 - protein, 211 aa, synthetic construct
  REGION 1..211: note = Variant of 3'O-kinase
MAVTIGLTGGIAAGKSTVSAMMRELGLPVIDADEAARAVMKPGEEAYRDIVAAFGPGILRADGEIDRQKLGAIRFSDEQQRKVLNSIVGPAVLKKMLAEKEAHIKSGAKTVVLDIPGLFESGLQSWVDKVLVVYVDDDVQLRRLMARNGFTEEEALKRIRSQWPSAEKVKRADAVIDNNGNIEETRRQLLDILHQWDLLDKGGSGHHHHHH

SEQ ID NO: 1293 - DNA, 633 bp, synthetic construct
  misc_feature 1..633: note = Variant of 3'O-kinase
  source 1..633: mol_type = other DNA
atggcggttaccattggtttaacaggagggatcgcagcgggcaaatcgactgtgagtgccatgatgcgtgaactgggtctgccggtcatcgatgctgacgaggcagcacgcgccgttatgaagccaggcgaagaagcgtatcgcgacattgtagctgcgttcggtccgggcattcttcgtgcggatggcgagatcgatcgccagaaactgggtgctatccgcttttcggacgaacaacaacgtaaggtgctgaattcgattgtaggtcctgcagtcctgaagaagatgctcgctgagaaagaagctcatatcaagtcaggcgccaagacggttgtgctggatatcccgctgctgttcgaatccggattgcaatcgtgggtcgacaaagttctcgtggtgtacgtcgatgatgatgttcagattcgccgccttatggcacgtaacgggtttactgaagaagaagctctgaagcgcattcgttcacagtggcccagtgcggagaaagttaaacgtgcagacgctgtcatcgacaataatggcaatattgaagaaacccgccgccagctgctggacattttacaccagtgggatctgctggacaagggtggctccggccaccatcatcaccatcac

SEQ ID NO: 1294 - protein, 211 aa, synthetic construct
  REGION 1..211: note = Variant of 3'O-kinase
MAVTIGLTGGIAAGKSTVSAMMRELGLPVIDADEAARAVMKPGEEAYRDIVAAFGPGILRADGEIDRQKLGAIRFSDEQQRKVLNSIVGPAVLKKMLAEKEAHIKSGAKTVVLDIPLLFESGLQSWVDKVLVVYVDDDVQIRRLMARNGFTEEEALKRIRSQWPSAEKVKRADAVIDNNGNIEETRRQLLDILHQWDLLDKGGSGHHHHHH

SEQ ID NO: 1295 - DNA, 633 bp, synthetic construct
  misc_feature 1..633: note = Variant of 3'O-kinase
  source 1..633: mol_type = other DNA
atggcggttaccattggtttaacaggagggatcgcagcgggcaaatcgactgtgagtgccatgatgcgtgaactgggtctgccggtcatcgatgctgacgaggcagcacgcgccgttatgaagccaggcgaagaagcgtatcgcgacattgtagctgcgttcggtccgggcattcttcgtgcggatggcgagatcgatcgccagaaactgggtgctatccgcttttcggacgaacaacaacgtaaggtgctgaattcgattgtaggtcctgcagtcctgaagaagatgctcgctgagaaagaagctcatatcaagtcaggcgccaagacggttgtgctggatatcccgctgctgttcgaatccggattgcaatcgtgggtcgacaaagttctcgtggtgtacgtcgatgatgatgttcagttacgccgccttatggcacgtaacgggtttactgaagaagaagctctgaagcgcattcgttcacagtggcccagtgcggagaaagttaaacgtgcagacgctgtcatcgacaataatggcaattgtgaagaaacccgccgccagctgctggacattttacaccagtgggatctgctggacaagggtggctccggccaccatcatcaccatcac

SEQ ID NO: 1296 - protein, 211 aa, synthetic construct
  REGION 1..211: note = Variant of 3'O-kinase
MAVTIGLTGGIAAGKSTVSAMMRELGLPVIDADEAARAVMKPGEEAYRDIVAAFGPGILRADGEIDRQKLGAIRFSDEQQRKVLNSIVGPAVLKKMLAEKEAHIKSGAKTVVLDIPLLFESGLQSWVDKVLVVYVDDDVQLRRLMARNGFTEEEALKRIRSQWPSAEKVKRADAVIDNNGNCEETRRQLLDILHQWDLLDKGGSGHHHHHH

SEQ ID NO: 1297 - DNA, 633 bp, synthetic construct
  misc_feature 1..633: note = Variant of 3'O-kinase
  source 1..633: mol_type = other DNA
atggcggttaccattggtttaacaggagggatcgcagcgggcaaatcgactgtgagtgccatgatgcgtgaactgggtctgccggtcatcgatgctgacgaggcagcacgcgccgttatgaagccaggcgaagaagcgtatcgcgacattgtagctgcgttcggtccgggcattcttcgtgcggatggcgagatcgatcgccagaaactgggtactatccgcttttcggacgaacaacaacgtaaggtgctgaattcgattgtaggtcctgcagtcctgaagaagatgctcgctgagaaagaagctcatatcaagtcaggcgccaagacggttgtgctggatatcccgctgctgttcgaatccggattgcaatcgtgggtcgacaaagttctcgtggtgtacgtcgatgatgatgttcagttacgccgccttatggcacgtaacgggtttactgaagaagaagctctgaagcgcattcgttcacagtggcccagtgcggagaaagttaaacgtgcagacgctgtcatcgacaataatggcaatattgaagaaacccgccgccagctgctggacattttacaccagtgggatctgctggacaagggtggctccggccaccatcatcaccatcac

SEQ ID NO: 1298 - protein, 211 aa, synthetic construct
  REGION 1..211: note = Variant of 3'O-kinase
MAVTIGLTGGIAAGKSTVSAMMRELGLPVIDADEAARAVMKPGEEAYRDIVAAFGPGILRADGEIDRQKLGTIRFSDEQQRKVLNSIVGPAVLKKMLAEKEAHIKSGAKTVVLDIPLLFESGLQSWVDKVLVVYVDDDVQLRRLMARNGFTEEEALKRIRSQWPSAEKVKRADAVIDNNGNIEETRRQLLDILHQWDLLDKGGSGHHHHHH

SEQ ID NO: 1299 - DNA, 633 bp, synthetic construct
  misc_feature 1..633: note = Variant of 3'O-kinase
  source 1..633: mol_type = other DNA
atggcggttaccattggtttaacaggagggatcgcagcgggcaaatcgactgtgagtgccatgatgcgtgaactgggtctgccggtcatcgatgctgacgaggcagcacgcgccgttatgaagccaggcgaagaagcgtatcgcgacattgtagctgcgttcggtccgggcattcttcgtgcggatggcgagatcgatcgccagaaactgggtaagatccgcttttcggacgaacaacaacgtaaggtgctgaattcgattgtaggtcctgcagtcctgaagaagatgctcgctgagaaagaagctcatatcaagtcaggcgccaagacggttgtgctggatatcccgctgctgttcgaatccggattgcaatcgtgggtcgacaaagttctcgtggtgtacgtcgatgatgatgttcagttacgccgccttatggcacgtaacgggtttactgaagaagaagctctgaagcgcattcgttcacagtggcccagtgcggagaaagttaaacgtgcagacgctgtcatcgacaataatggcaatattgaagaaacccgccgccagctgctggacattttacaccagtgggatctgctggacaagggtggctccggccaccatcatcaccatcac

SEQ ID NO: 1300 - protein, 211 aa, synthetic construct
  REGION 1..211: note = Variant of 3'O-kinase
MAVTIGLTGGIAAGKSTVSAMMRELGLPVIDADEAARAVMKPGEEAYRDIVAAFGPGILRADGEIDRQKLGKIRFSDEQQRKVLNSIVGPAVLKKMLAEKEAHIKSGAKTVVLDIPLLFESGLQSWVDKVLVVYVDDDVQLRRLMARNGFTEEEALKRIRSQWPSAEKVKRADAVIDNNGNIEETRRQLLDILHQWDLLDKGGSGHHHHHH

SEQ ID NO: 1301 - DNA, 633 bp, synthetic construct
  misc_feature 1..633: note = Variant of 3'O-kinase
  source 1..633: mol_type = other DNA
atggcggttaccattggtttaacaggagggatcgcagcgggcaaatcgactgtgagtgccatgatgcgtgaactgggtctgccggtcatcgatgctgacgaggcagcacgcgccgttatgaagccaggcgaagaagcgtatcgcgacattgtagctgcgttcggtccgggcattcttcgtgcggatggcgagatcgatcgccagaaactgggtgctatccgcttttcggacgaacaacaacgtaaggtgctgaattcgattgtaggtcctgcagtcctgaagaagatgctcgctgagaaagaagctcatatcaagtcaggcgccaagacggttgtgctggatatcccgctgctgttcgaatccggattgcaatcgtgggtcgacaaagttctcgtggtgtacgtcgatgatgatgttcagttacgccgccttatggcacgtaacgggcttactgaagaagaagctctgaagcgcattcgttcacagtggcccagtgcggagaaagttaaacgtgcagacgctgtcatcgacaataatggcaatattgaagaaacccgccgccagctgctggacattttacaccagtgggatctgctggacaagggtggctccggccaccatcatcaccatcac

SEQ ID NO: 1302 - protein, 211 aa, synthetic construct
  REGION 1..211: note = Variant of 3'O-kinase
MAVTIGLTGGIAAGKSTVSAMMRELGLPVIDADEAARAVMKPGEEAYRDIVAAFGPGILRADGEIDRQKLGAIRFSDEQQRKVLNSIVGPAVLKKMLAEKEAHIKSGAKTVVLDIPLLFESGLQSWVDKVLVVYVDDDVQLRRLMARNGLTEEEALKRIRSQWPSAEKVKRADAVIDNNGNIEETRRQLLDILHQWDLLDKGGSGHHHHHH

SEQ ID NO: 1303 - DNA, 633 bp, synthetic construct
  misc_feature 1..633: note = Variant of 3'O-kinase
  source 1..633: mol_type = other DNA
atggcggttaccattggtttaacaggagggatcgcagcgggcaaatcgactgtgagtgccatgatgcgtgaactgggtctgccggtcatcgatgctgacgaggcagcacgcgccgttatgaagccaggcgaagaagcgtatcgcgacattgtagctgcgttcggtccgggcattcttcgtgcggatggcgagatcgatcgccagaaactgggtgctatcggtttttcggacgaacaacaacgtaaggtgctgaattcgattgtaggtcctgcagtcctgaagaagatgctcgctgagaaagaagctcatatcaagtcaggcgccaagacggttgtgctggatatcccgctgctgttcgaatccggattgcaatcgtgggtcgacaaagttctcgtggtgtacgtcgatgatgatgttcagttacgccgccttatggcacgtaacgggtttactgaagaagaagctctgaagcgcattcgttcacagtggcccagtgcggagaaagttaaacgtgcagacgctgtcatcgacaataatggcaatattgaagaaacccgccgccagctgctggacattttacaccagtgggatctgctggacaagggtggctccggccaccatcatcaccatcac

SEQ ID NO: 1304 - protein, 211 aa, synthetic construct
  REGION 1..211: note = Variant of 3'O-kinase
MAVTIGLTGGIAAGKSTVSAMMRELGLPVIDADEAARAVMKPGEEAYRDIVAAFGPGILRADGEIDRQKLGAIGFSDEQQRKVLNSIVGPAVLKKMLAEKEAHIKSGAKTVVLDIPLLFESGLQSWVDKVLVVYVDDDVQLRRLMARNGFTEEEALKRIRSQWPSAEKVKRADAVIDNNGNIEETRRQLLDILHQWDLLDKGGSGHHHHHH

SEQ ID NO: 1305 - DNA, 633 bp, synthetic construct
  misc_feature 1..633: note = Variant of 3'O-kinase
  source 1..633: mol_type = other DNA
atggcggttaccattggtttaacaggagggatcgcagcgggcaaatcgactgtgagtgccatgatgcgtgaactgggtctgccggtcatcgatgctgacgaggcagcacgcgccgttatgaagccaggcgaagaagcgtatcgcgacattgtagctgcgttcggtccgggcattcttcgtgcggatggcgagatcgatcgccagaaactgggtgctatccgcttttcggacgaacaacaacgtaaggtgctgaattcgattgtaggtcctgcagtcctgaagaagatgctcgctgagaaagaagctatgatcaagtcaggcgccaagacggttgtgctggatatcccgctgctgttcgaatccggattgcaatcgtgggtcgacaaagttctcgtggtgtacgtcgatgatgatgttcagttacgccgccttatggcacgtaacgggtttactgaagaagaagctctgaagcgcattcgttcacagtggcccagtgcggagaaagttaaacgtgcagacgctgtcatcgacaataatggcaatattgaagaaacccgccgccagctgctggacattttacaccagtgggatctgctggacaagggtggctccggccaccatcatcaccatcac

SEQ ID NO: 1306 - protein, 211 aa, synthetic construct
  REGION 1..211: note = Variant of 3'O-kinase
MAVTIGLTGGIAAGKSTVSAMMRELGLPVIDADEAARAVMKPGEEAYRDIVAAFGPGILRADGEIDRQKLGAIRFSDEQQRKVLNSIVGPAVLKKMLAEKEAMIKSGAKTVVLDIPLLFESGLQSWVDKVLVVYVDDDVQLRRLMARNGFTEEEALKRIRSQWPSAEKVKRADAVIDNNGNIEETRRQLLDILHQWDLLDKGGSGHHHHHH

SEQ ID NO: 1307 - DNA, 633 bp, synthetic construct
  misc_feature 1..633: note = Variant of 3'O-kinase
  source 1..633: mol_type = other DNA
atggcggttaccattggtttaacaggagggatcgcagcgggcaaatcgactgtgagtgccatgatgcgtgaactgggtctgccggtcatcgatgctgacgaggcagcacgcgccgttatgaagccaggcgaagaagcgtatcgcgacattgtagctgcgttcggtccgggcattcttcgtgcggatggcgagatcgatcgccagaaactgggtgctatccgcttttcggacgaacaacaacgtaaggtgctgaattcgattgtaggtcctgcagtcctgaagaagatgctcgctgagaaagaagctcatatcaagtcaggcgccaagacggttgtgctggatatcccgctgctgttcgaatccggattgcaatcgtgggtcgacaaagttctcgtggtgtacgtcgatgatgatgttcagttacgccgccttatggcacgtaacgggtttactgaagaagaagctctgaagcgcattgattcacagtggcccagtgcggagaaagttaaacgtgcagacgctgtcatcgacaataatggcaatattgaagaaacccgccgccagctgctggacattttacaccagtgggatctgctggacaagggtggctccggccaccatcatcaccatcac

SEQ ID NO: 1308 - protein, 211 aa, synthetic construct
  REGION 1..211: note = Variant of 3'O-kinase
MAVTIGLTGGIAAGKSTVSAMMRELGLPVIDADEAARAVMKPGEEAYRDIVAAFGPGILRADGEIDRQKLGAIRFSDEQQRKVLNSIVGPAVLKKMLAEKEAHIKSGAKTVVLDIPLLFESGLQSWVDKVLVVYVDDDVQLRRLMARNGFTEEEALKRIDSQWPSAEKVKRADAVIDNNGNIEETRRQLLDILHQWDLLDKGGSGHHHHHH

SEQ ID NO: 1309 - DNA, 633 bp, synthetic construct
  misc_feature 1..633: note = Variant of 3'O-kinase
  source 1..633: mol_type = other DNA
atggcggttaccattggtttaacaggagggatcgcagcgggcaaatcgactgtgagtgccatgatgcgtgaactgggtctgccggtcatcgatgctgacgaggcagcacgcgccgttatgaagccaggcgaagaagcgtatcgcgacattgtagctgcgttcggtccgggcattcttcgtgcggatggcgagatcgattttcagaaactgggtgctatccgcttttcggacgaacaacaacgtaaggtgctgaattcgattgtaggtcctgcagtcctgaagaagatgctcgctgagaaagaagctcatatcaagtcaggcgccaagacggttgtgctggatatcccgctgctgttcgaatccggattgcaatcgtgggtcgacaaagttctcgtggtgtacgtcgatgatgatgttcagttacgccgccttatggcacgtaacgggtttactgaagaagaagctctgaagcgcattcgttcacagtggcccagtgcggagaaagttaaacgtgcagacgctgtcatcgacaataatggcaatattgaagaaacccgccgccagctgctggacattttacaccagtgggatctgctggacaagggtggctccggccaccatcatcaccatcac

SEQ ID NO: 1310 - protein, 211 aa, synthetic construct
  REGION 1..211: note = Variant of 3'O-kinase
MAVTIGLTGGIAAGKSTVSAMMRELGLPVIDADEAARAVMKPGEEAYRDIVAAFGPGILRADGEIDFQKLGAIRFSDEQQRKVLNSIVGPAVLKKMLAEKEAHIKSGAKTVVLDIPLLFESGLQSWVDKVLVVYVDDDVQLRRLMARNGFTEEEALKRIRSQWPSAEKVKRADAVIDNNGNIEETRRQLLDILHQWDLLDKGGSGHHHHHH

SEQ ID NO: 1311 - DNA, 633 bp, synthetic construct
  misc_feature 1..633: note = Variant of 3'O-kinase
  source 1..633: mol_type = other DNA
atggcggttaccattggtttaacaggagggatcgcagcgggcaaatcgactgtgagtgccatgatgcgtgaactgggtctgccggtcatcgatgctgacgaggcagcacgcgccgttatgaagccaggcgaagaagcgtatcgcgacattgtagctgcgttcggtccgggcattcttcgtgcggatggcgagatcgatcgccagaaactgggtgctatccgcttttcggacgaacaacaacgtaaggtgctgaattcgattgtaggtcctgcagtcctgaagaagatgctcgctgagaaagaagctcatatcaagtcaggcgccaagacggttgtgctggatatcccgctgctgttcgaatccggattgcaatcgtgggtcgacaaagttctcgtggtgcatgtcgatgatgatgttcagttacgccgccttatggcacgtaacgggtttactgaagaagaagctctgaagcgcattcgttcacagtggcccagtgcggagaaagttaaacgtgcagacgctgtcatcgacaataatggcaatattgaagaaacccgccgccagctgctggacattttacaccagtgggatctgctggacaagggtggctccggccaccatcatcaccatcac

SEQ ID NO: 1312 - protein, 211 aa, synthetic construct
  REGION 1..211: note = Variant of 3'O-kinase
MAVTIGLTGGIAAGKSTVSAMMRELGLPVIDADEAARAVMKPGEEAYRDIVAAFGPGILRADGEIDRQKLGAIRFSDEQQRKVLNSIVGPAVLKKMLAEKEAHIKSGAKTVVLDIPLLFESGLQSWVDKVLVVHVDDDVQLRRLMARNGFTEEEALKRIRSQWPSAEKVKRADAVIDNNGNIEETRRQLLDILHQWDLLDKGGSGHHHHHH

SEQ ID NO: 1313 - DNA, 633 bp, synthetic construct
  misc_feature 1..633: note = Variant of 3'O-kinase
  source 1..633: mol_type = other DNA
atggcggttaccattggtttaacaggagggatcgcagcgggcaaatcgactgtgagtgccatgatgcgtgaactgggttatccggtcatcgatgctgacgaggcagcacgcgccgttatgaagccaggcgaagaagcgtatcgcgacattgtagctgcgttcggtccgggcattcttcgtgcggatggcgagatcgatcgccagaaactgggtgctatccgcttttcggacgaacaacaacgtaaggtgctgaattcgattgtaggtcctgcagtcctgaagaagatgctcgctgagaaagaagctcatatcaagtcaggcgccaagacggttgtgctggatatcccgctgctgttcgaatccggattgcaatcgtgggtcgacaaagttctcgtggtgtacgtcgatgatgatgttcagttacgccgccttatggcacgtaacgggtttactgaagaagaagctctgaagcgcattcgttcacagtggcccagtgcggagaaagttaaacgtgcagacgctgtcatcgacaataatggcaatattgaagaaacccgccgccagctgctggacattttacaccagtgggatctgctggacaagggtggctccggccaccatcatcaccatcac

SEQ ID NO: 1314 - protein, 211 aa, synthetic construct
  REGION 1..211: note = Variant of 3'O-kinase
MAVTIGLTGGIAAGKSTVSAMMRELGYPVIDADEAARAVMKPGEEAYRDIVAAFGPGILRADGEIDRQKLGAIRFSDEQQRKVLNSIVGPAVLKKMLAEKEAHIKSGAKTVVLDIPLLFESGLQSWVDKVLVVYVDDDVQLRRLMARNGFTEEEALKRIRSQWPSAEKVKRADAVIDNNGNIEETRRQLLDILHQWDLLDKGGSGHHHHHH

SEQ ID NO: 1315 - DNA, 633 bp, synthetic construct
  misc_feature 1..633: note = Variant of 3'O-kinase
  source 1..633: mol_type = other DNA
atggcggttaccattggtttaacaggagggatcgcagcgggcaaatcgactgtgagtgccatgatgcgtgaactgggtctgccggtcatcgatgctgacgaggcagcacgcgccgttatgaagccaggcgaagaagcgtatcgcgacattgtagctgcgttcggtccgggcattcttcgtgcggatggcgagatcgatcgccagaaactgggtgctatccgcttttcggacgaacaacaacgtaaggtgctgaattcgattgtaggtcctgcagtcctgaagaagatgctcgctgagaaagaagctcatatcaagtcaggcgccaagacggttgtgctggatatcccgctgctgttcgaatccggattgcaatcgtgggtcgacaaagttctcgtggtgtacgtcgatgatgatgttcagttacgccgccttatggcacgtaacgggtttactgaagaagaagctctgaagcgcattcgttcacagtggcccagtgaggagaaagttaaacgtgcagacgctgtcatcgacaataatggcaatattgaagaaacccgccgccagctgctggacattttacaccagtgggatctgctggacaagggtggctccggccaccatcatcaccatcac

SEQ ID NO: 1316 - protein, 211 aa, synthetic construct
  REGION 1..211: note = Variant of 3'O-kinase
MAVTIGLTGGIAAGKSTVSAMMRELGLPVIDADEAARAVMKPGEEAYRDIVAAFGPGILRADGEIDRQKLGAIRFSDEQQRKVLNSIVGPAVLKKMLAEKEAHIKSGAKTVVLDIPLLFESGLQSWVDKVLVVYVDDDVQLRRLMARNGFTEEEALKRIRSQWPSEEKVKRADAVIDNNGNIEETRRQLLDILHQWDLLDKGGSGHHHHHH

SEQ ID NO: 1317 - DNA, 633 bp, synthetic construct
  misc_feature 1..633: note = Variant of 3'O-kinase
  source 1..633: mol_type = other DNA
atggcggttaccattggtttaacaggagggatcgcagcgggcaaatcgactgtgagtgccatgatgcgtgaactgggtctgccggtcatcgatgctgacgaggcagcacgcgccgttatgaagccaggcgaagaagcgtatcgcgacattgtagctgcgttcggtccgggcattcttcgtgcggatggcgagatcgatcgccagaaactgggtgctatccgcttttcggacgaacaacaacgtaaggtgctgaattcgattgtaggtcctgcagtcctgaagaagatgctcgctgagaaagaagctcatatcaagtcaggcgccaagacggttgtgctggatatcccgctgctgttcgaatccggattgcaatcgtgggtcgacaaagttctcgtggtgtacgtcgatgatgatgttcagttacgccgccttatggcacgtaacgggtttactgaagaagaagctctgaagcgcattcgttcacagtggcccagtcttgagaaagttaaacgtgcagacgctgtcatcgacaataatggcaatattgaagaaacccgccgccagctgctggacattttacaccagtgggatctgctggacaagggtggctccggccaccatcatcaccatcac

SEQ ID NO: 1318 - protein, 211 aa, synthetic construct
  REGION 1..211: note = Variant of 3'O-kinase
MAVTIGLTGGIAAGKSTVSAMMRELGLPVIDADEAARAVMKPGEEAYRDIVAAFGPGILRADGEIDRQKLGAIRFSDEQQRKVLNSIVGPAVLKKMLAEKEAHIKSGAKTVVLDIPLLFESGLQSWVDKVLVVYVDDDVQLRRLMARNGFTEEEALKRIRSQWPSLEKVKRADAVIDNNGNIEETRRQLLDILHQWDLLDKGGSGHHHHHH

SEQ ID NO: 1319 - DNA, 633 bp, synthetic construct
  misc_feature 1..633: note = Variant of 3'O-kinase
  source 1..633: mol_type = other DNA
atggcggttaccattggtttaacaggagggatcgcagcgggcaaatcgactgtgagtgccatgatgcgtgaactgggtctgccggtcatcgatgctgacgaggcagcacgcgccgttatgaagccaggcgaagaagcgtatcgcgacattgtagctgcgttcggtccgggcattcttcgtgcggatggcgagatcgatcgccagaaactgggtgctatccgcttttcggacgaacaacaacgtaaggtgctgaattcgattgtaggtcctgcagtcctgaagaagatgctcgctgagaaagaagctcatatcaagtcaggcgccaagacggttgtgctggatatcccgctgctgttcgaatccggattgcaatcgtgggtcgacaaagttctcgtggtgtacgtcgatgatgatgttcagttacgccgccttatggcacgtaacgggtttactgaagaagaagctctggagcgcattcgttcacagtggcccagtgcggagaaagttaaacgtgcagacgctgtcatcgacaataatggcaatattgaagaaacccgccgccagctgctggacattttacaccagtgggatctgctggacaagggtggctccggccaccatcatcaccatcac

SEQ ID NO: 1320 - protein, 211 aa, synthetic construct
  REGION 1..211: note = Variant of 3'O-kinase
MAVTIGLTGGIAAGKSTVSAMMRELGLPVIDADEAARAVMKPGEEAYRDIVAAFGPGILRADGEIDRQKLGAIRFSDEQQRKVLNSIVGPAVLKKMLAEKEAHIKSGAKTVVLDIPLLFESGLQSWVDKVLVVYVDDDVQLRRLMARNGFTEEEALERIRSQWPSAEKVKRADAVIDNNGNIEETRRQLLDILHQWDLLDKGGSGHHHHHH

SEQ ID NO: 1321 - DNA, 633 bp, synthetic construct
  misc_feature 1..633: note = Variant of 3'O-kinase
  source 1..633: mol_type = other DNA
atggcggttaccattggtttaacaggagggatcgcagcgggcaaatcgactgtgagtgccatgatgcgtgaactgggtctgccggtcatcgatgctgacgaggcagcacgcgccgttatgaagccaggcgaagaagcgtatcgcgacattgtagctgcgttcggtccgggcattcttcgtgcggatggcgagatcgatcgccagaaactgggtgctatctgtttttcggacgaacaacaacgtaaggtgctgaattcgattgtaggtcctgcagtcctgaagaagatgctcgctgagaaagaagctcatatcaagtcaggcgccaagacggttgtgctggatatcccgctgctgttcgaatccggattgcaatcgtgggtcgacaaagttctcgtggtgtacgtcgatgatgatgttcagttacgccgccttatggcacgtaacgggtttactgaagaagaagctctgaagcgcattcgttcacagtggcccagtgcggagaaagttaaacgtgcagacgctgtcatcgacaataatggcaatattgaagaaacccgccgccagctgctggacattttacaccagtgggatctgctggacaagggtggctccggccaccatcatcaccatcac

SEQ ID NO: 1322 - protein, 211 aa, synthetic construct
  REGION 1..211: note = Variant of 3'O-kinase
MAVTIGLTGGIAAGKSTVSAMMRELGLPVIDADEAARAVMKPGEEAYRDIVAAFGPGILRADGEIDRQKLGAICFSDEQQRKVLNSIVGPAVLKKMLAEKEAHIKSGAKTVVLDIPLLFESGLQSWVDKVLVVYVDDDVQLRRLMARNGFTEEEALKRIRSQWPSAEKVKRADAVIDNNGNIEETRRQLLDILHQWDLLDKGGSGHHHHHH

SEQ ID NO: 1323 - DNA, 633 bp, synthetic construct
  misc_feature 1..633: note = Variant of 3'O-kinase
  source 1..633: mol_type = other DNA
atggcggttaccattggtttaacaggagggatcgcagcgggcaaatcgactgtgagtgccatgatgcgtgaactgggtctgccggtcatcgatgctgacgaggcagcacgcgccgttatgaagccaggcgaagaagcgtatcgcgacattgtagctgcgttcggtccgggcattcttcgtgcggatggcgagatcgatcgccagaaactgggtgctatcgtgttttcggacgaacaacaacgtaaggtgctgaattcgattgtaggtcctgcagtcctgaagaagatgctcgctgagaaagaagctcatatcaagtcaggcgccaagacggttgtgctggatatcccgctgctgttcgaatccggattgcaatcgtgggtcgacaaagttctcgtggtgtacgtcgatgatgatgttcagttacgccgccttatggcacgtaacgggtttactgaagaagaagctctgaagcgcattcgttcacagtggcccagtgcggagaaagttaaacgtgcagacgctgtcatcgacaataatggcaatattgaagaaacccgccgccagctgctggacattttacaccagtgggatctgctggacaagggtggctccggccaccatcatcaccatcac

SEQ ID NO: 1324 - protein, 211 aa, synthetic construct
  REGION 1..211: note = Variant of 3'O-kinase
MAVTIGLTGGIAAGKSTVSAMMRELGLPVIDADEAARAVMKPGEEAYRDIVAAFGPGILRADGEIDRQKLGAIVFSDEQQRKVLNSIVGPAVLKKMLAEKEAHIKSGAKTVVLDIPLLFESGLQSWVDKVLVVYVDDDVQLRRLMARNGFTEEEALKRIRSQWPSAEKVKRADAVIDNNGNIEETRRQLLDILHQWDLLDKGGSGHHHHHH

SEQ ID NO: 1325 - DNA, 633 bp, synthetic construct
  misc_feature 1..633: note = Variant of 3'O-kinase
  source 1..633: mol_type = other DNA
atggcggttaccattggtttaacaggagggatcgcagcgggcaaatcgactgtgagtgccatgatgcgtgaactgggtctgccggtcatcgatgctgacgaggcagcacgcgccgttatgaagccaggcgaagaagcgtatcgcgacattgtagctgcgttcggtccgggcattcttcgtgcggatggcgagatcgatcgccagaaactgggtgctatcgctttttcggacgaacaacaacgtaaggtgctgaattcgattgtaggtcctgcagtcctgaagaagatgctcgctgagaaagaagctcatatcaagtcaggcgccaagacggttgtgctggatatcccgctgctgttcgaatccggattgcaatcgtgggtcgacaaagttctcgtggtgtacgtcgatgatgatgttcagttacgccgccttatggcacgtaacgggtttactgaagaagaagctctgaagcgcattcgttcacagtggcccagtgcggagaaagttaaacgtgcagacgctgtcatcgacaataatggcaatattgaagaaacccgccgccagctgctggacattttacaccagtgggatctgctggacaagggtggctccggccaccatcatcaccatcac

SEQ ID NO: 1326 - protein, 211 aa, synthetic construct
  REGION 1..211: note = Variant of 3'O-kinase
MAVTIGLTGGIAAGKSTVSAMMRELGLPVIDADEAARAVMKPGEEAYRDIVAAFGPGILRADGEIDRQKLGAIAFSDEQQRKVLNSIVGPAVLKKMLAEKEAHIKSGAKTVVLDIPLLFESGLQSWVDKVLVVYVDDDVQLRRLMARNGFTEEEALKRIRSQWPSAEKVKRADAVIDNNGNIEETRRQLLDILHQWDLLDKGGSGHHHHHH

SEQ ID NO: 1327 - DNA, 633 bp, synthetic construct
  misc_feature 1..633: note = Variant of 3'O-kinase
  source 1..633: mol_type = other DNA
atggcggttaccattggtttaacaggagggatcgcagcgggcaaatcgactgtgagtgccatgatgcgtgaactgggtctgccggtcatcgatgctgacgaggcagcacgcgccgttatgaagccaggcgaagaagcgtatcgcgacattgtagctgcgttcggtccgggcattcttcgtgcggatggcgagatcgatcgccagaaactgcaggctatccgcttttcggacgaacaacaacgtaaggtgctgaattcgattgtaggtcctgcagtcctgaagaagatgctcgctgagaaagaagctcatatcaagtcaggcgccaagacggttgtgctggatatcccgctgctgttcgaatccggattgcaatcgtgggtcgacaaagttctcgtggtgtacgtcgatgatgatgttcagttacgccgccttatggcacgtaacgggtttactgaagaagaagctctgaagcgcattcgttcacagtggcccagtgcggagaaagttaaacgtgcagacgctgtcatcgacaataatggcaatattgaagaaacccgccgccagctgctggacattttacaccagtgggatctgctggacaagggtggctccggccaccatcatcaccatcac

SEQ ID NO: 1328 - protein, 211 aa, synthetic construct
  REGION 1..211: note = Variant of 3'O-kinase
MAVTIGLTGGIAAGKSTVSAMMRELGLPVIDADEAARAVMKPGEEAYRDIVAAFGPGILRADGEIDRQKLQAIRFSDEQQRKVLNSIVGPAVLKKMLAEKEAHIKSGAKTVVLDIPLLFESGLQSWVDKVLVVYVDDDVQLRRLMARNGFTEEEALKRIRSQWPSAEKVKRADAVIDNNGNIEETRRQLLDILHQWDLLDKGGSGHHHHHH

SEQ ID NO: 1329 - DNA, 633 bp, synthetic construct
  misc_feature 1..633: note = Variant of 3'O-kinase
  source 1..633: mol_type = other DNA
atggcggttaccattggtttaacaggagggatcgcagcgggcaaatcgactgtgagtgccatgatgcgtgaactgggtctgccggtcatcgatgctgacgaggcagcacgcgccgttatgaagccaggcgaagaagcgtatcgcgacattgtagctgcgttcggtccgggcattcttcgtgcggatggcgagatcgatcgccagaaactgggtgctatccgcttttcggacgaacaacaacgtaaggtgctgaattcgattgtaggtcctgcagtcctgaagaagatgctcgctgagaaagaagctcttatcaagtcaggcgccaagacggttgtgctggatatcccgctgctgttcgaatccggattgcaatcgtgggtcgacaaagttctcgtggtgtacgtcgatgatgatgttcagttacgccgccttatggcacgtaacgggtttactgaagaagaagctctgaagcgcattcgttcacagtggcccagtgcggagaaagttaaacgtgcagacgctgtcatcgacaataatggcaatattgaagaaacccgccgccagctgctggacattttacaccagtgggatctgctggacaagggtggctccggccaccatcatcaccatcac

SEQ ID NO: 1330 - protein, 211 aa, synthetic construct
  REGION 1..211: note = Variant of 3'O-kinase
MAVTIGLTGGIAAGKSTVSAMMRELGLPVIDADEAARAVMKPGEEAYRDIVAAFGPGILRADGEIDRQKLGAIRFSDEQQRKVLNSIVGPAVLKKMLAEKEALIKSGAKTVVLDIPLLFESGLQSWVDKVLVVYVDDDVQLRRLMARNGFTEEEALKRIRSQWPSAEKVKRADAVIDNNGNIEETRRQLLDILHQWDLLDKGGSGHHHHHH

SEQ ID NO: 1331 - DNA, 633 bp, synthetic construct
  misc_feature 1..633: note = Variant of 3'O-kinase
  source 1..633: mol_type = other DNA
atggcggttaccattggtttaacaggagggatcgcagcgggcaaatcgactgtgagtgccatgatgcgtgaactgggtctgccggtcatcgatgctgacgaggcagcacgcgccgttatgaagccaggcgaagaagcgtatcgcgacattgtagctgcgttcggtccgggcattcttcgtgcggatggcgagatcgatcgcgggaaactgggtgctatccgcttttcggacgaacaacaacgtaaggtgctgaattcgattgtaggtcctgcagtcctgaagaagatgctcgctgagaaagaagctcatatcaagtcaggcgccaagacggttgtgctggatatcccgctgctgttcgaatccggattgcaatcgtgggtcgacaaagttctcgtggtgtacgtcgatgatgatgttcagttacgccgccttatggcacgtaacgggtttactgaagaagaagctctgaagcgcattcgttcacagtggcccagtgcggagaaagttaaacgtgcagacgctgtcatcgacaataatggcaatattgaagaaacccgccgccagctgctggacattttacaccagtgggatctgctggacaagggtggctccggccaccatcatcaccatcac

SEQ ID NO: 1332 - protein, 211 aa, synthetic construct
  REGION 1..211: note = Variant of 3'O-kinase
MAVTIGLTGGIAAGKSTVSAMMRELGLPVIDADEAARAVMKPGEEAYRDIVAAFGPGILRADGEIDRGKLGAIRFSDEQQRKVLNSIVGPAVLKKMLAEKEAHIKSGAKTVVLDIPLLFESGLQSWVDKVLVVYVDDDVQLRRLMARNGFTEEEALKRIRSQWPSAEKVKRADAVIDNNGNIEETRRQLLDILHQWDLLDKGGSGHHHHHH

SEQ ID NO: 1333 - DNA, 633 bp, synthetic construct
  misc_feature 1..633: note = Variant of 3'O-kinase
  source 1..633: mol_type = other DNA
atggcggttaccattggtttaacaggagggatcgcagcgggcaaatcgactgtgagtactatgatgcgtgaactgggtctgccggtcatcgatgctgacgaggcagcacgcgccgttatgaagccaggcgaagaagcgtatcgcgacattgtagctgcgttcggtccgggcattcttcgtgcggatggcgagatcgatcgccagaaactgggtgctatccgcttttcggacgaacaacaacgtaaggtgctgaattcgattgtaggtcctgcagtcctgaagaagatgctcgctgagaaagaagctcatatcaagtcaggcgccaagacggttgtgctggatatcccgctgctgttcgaatccggattgcaatcgtgggtcgacaaagttctcgtggtgtacgtcgatgatgatgttcagttacgccgccttatggcacgtaacgggtttactgaagaagaagctctgaagcgcattcgttcacagtggcccagtgcggagaaagttaaacgtgcagacgctgtcatcgacaataatggcaatattgaagaaacccgccgccagctgctggacattttacaccagtgggatctgctggacaagggtggctccggccaccatcatcaccatcac

SEQ ID NO: 1334 - protein, 211 aa, synthetic construct
  REGION 1..211: note = Variant of 3'O-kinase
MAVTIGLTGGIAAGKSTVSTMMRELGLPVIDADEAARAVMKPGEEAYRDIVAAFGPGILRADGEIDRQKLGAIRFSDEQQRKVLNSIVGPAVLKKMLAEKEAHIKSGAKTVVLDIPLLFESGLQSWVDKVLVVYVDDDVQLRRLMARNGFTEEEALKRIRSQWPSAEKVKRADAVIDNNGNIEETRRQLLDILHQWDLLDKGGSGHHHHHH

SEQ ID NO: 1335 - DNA, 633 bp, synthetic construct
  misc_feature 1..633: note = Variant of 3'O-kinase
  source 1..633: mol_type = other DNA
atggcggttaccattggtttaacaggagggatcgcagcgggcaaatcgactgtgagtgccatgatgcgtgaactgggtctgccggtcatcgatgctgacgaggcagcacgcgccgttatgaagccaggcgaagaagcgtatcgcgacattgtagctgcgttcggtccgggcattcttcgtgcggatggcgagatcgatcgccagaaactgggtgctatccgcttttcggacgaacaacaacgtaaggtgctgaattcgattgtaggtcctgcagtcctgaagaagatgctcgctgagaaagaagctcatatcaagtcaggcgccaagacggttgtgctggatatcccgctgctgttcgaatccggattgtattcgtgggtcgacaaagttctcgtggtgtacgtcgatgatgatgttcagttacgccgccttatggcacgtaacgggtttactgaagaagaagctctgaagcgcattcgttcacagtggcccagtgcggagaaagttaaacgtgcagacgctgtcatcgacaataatggcaatattgaagaaacccgccgccagctgctggacattttacaccagtgggatctgctggacaagggtggctccggccaccatcatcaccatcac

SEQ ID NO: 1336 - protein, 211 aa, synthetic construct
  REGION 1..211: note = Variant of 3'O-kinase
MAVTIGLTGGIAAGKSTVSAMMRELGLPVIDADEAARAVMKPGEEAYRDIVAAFGPGILRADGEIDRQKLGAIRFSDEQQRKVLNSIVGPAVLKKMLAEKEAHIKSGAKTVVLDIPLLFESGLYSWVDKVLVVYVDDDVQLRRLMARNGFTEEEALKRIRSQWPSAEKVKRADAVIDNNGNIEETRRQLLDILHQWDLLDKGGSGHHHHHH

SEQ ID NO: 1337 - DNA, 633 bp, synthetic construct
  misc_feature 1..633: note = Variant of 3'O-kinase
  source 1..633: mol_type = other DNA
atggcggttaccattggtttaacaggagggatcgcagcgggcaaatcgactgtgagtgccatgatgcgtgaactgggtctgccggtcatcgatgctgacgaggcagcacgcgccgttatgaagccaggcgaagaagcgtatcgcgacattgtagctgcgttcggtccgggcattcttcgtgcggatggcgagatcgatcgccagaaactgggtgctatccgcttttcggacgaacaacaacgtaaggtgctgaattcgattgtaggtcctgcagtcctgaagaagattctcgctgagaaagaagctcatatcaagtcaggcgccaagacggttgtgctggatatcccgctgctgttcgaatccggattgcaatcgtgggtcgacaaagttctcgtggtgtacgtcgatgatgatgttcagttacgccgccttatggcacgtaacgggtttactgaagaagaagctctgaagcgcattcgttcacagtggcccagtgcggagaaagttaaacgtgcagacgctgtcatcgacaataatggcaatattgaagaaacccgccgccagctgctggacattttacaccagtgggatctgctggacaagggtggctccggccaccatcatcaccatcac

SEQ ID NO: 1338 - protein, 211 aa, synthetic construct
  REGION 1..211: note = Variant of 3'O-kinase
MAVTIGLTGGIAAGKSTVSAMMRELGLPVIDADEAARAVMKPGEEAYRDIVAAFGPGILRADGEIDRQKLGAIRFSDEQQRKVLNSIVGPAVLKKILAEKEAHIKSGAKTVVLDIPLLFESGLQSWVDKVLVVYVDDDVQLRRLMARNGFTEEEALKRIRSQWPSAEKVKRADAVIDNNGNIEETRRQLLDILHQWDLLDKGGSGHHHHHH

SEQ ID NO: 1339 - DNA, 633 bp, synthetic construct
  misc_feature 1..633: note = Variant of 3'O-kinase
  source 1..633: mol_type = other DNA
atggcggttaccattggtttaacaggagggatcgcagcgggcaaatcgactgtgagtgccatgatgcgtgaactgggtctgccggtcatcgatgctgacgaggcagcacgcgccgttatgaagccaggcgaagaagcgtatcgcgacattgtagctgcgttcggtccgggcattcttcgtgcggatggcgagatcgatcgccagaaactgcgtgctatccgcttttcggacgaacaacaacgtaaggtgctgaattcgattgtaggtcctgcagtcctgaagaagatgctcgctgagaaagaagctcatatcaagtcaggcgccaagacggttgtgctggatatcccgctgctgttcgaatccggattgcaatcgtgggtcgacaaagttctcgtggtgtacgtcgatgatgatgttcagttacgccgccttatggcacgtaacgggtttactgaagaagaagctctgaagcgcattcgttcacagtggcccagtgcggagaaagttaaacgtgcagacgctgtcatcgacaataatggcaatattgaagaaacccgccgccagctgctggacattttacaccagtgggatctgctggacaagggtggctccggccaccatcatcaccatcac

SEQ ID NO: 1340 - protein, 211 aa, synthetic construct
  REGION 1..211: note = Variant of 3'O-kinase
MAVTIGLTGGIAAGKSTVSAMMRELGLPVIDADEAARAVMKPGEEAYRDIVAAFGPGILRADGEIDRQKLRAIRFSDEQQRKVLNSIVGPAVLKKMLAEKEAHIKSGAKTVVLDIPLLFESGLQSWVDKVLVVYVDDDVQLRRLMARNGFTEEEALKRIRSQWPSAEKVKRADAVIDNNGNIEETRRQLLDILHQWDLLDKGGSGHHHHHH

SEQ ID NO: 1341 - DNA, 633 bp, synthetic construct
  misc_feature 1..633: note = Variant of 3'O-kinase
  source 1..633: mol_type = other DNA
atggcggttaccattggtttaacaggagggatcgcagcgggcaaatcgactgtgagtgccatgatgcgtgaactgggtctgccggtcatcgatgctgacgaggcagcacgcgccgttatgaagccaggcgaagaagcgtatcgcgacattgtagctgcgttcggtccgggcattcttcgtgcggatggcgagatcgatcgccagaaactgggtgctatccgcttttcggacgaacaacaacgtaaggtgctgaattcgattgtaggtcctgcagtcctgaagaagatgctcgctgagaaagaagctcatatcaagtcaggcgccaagacggttgtgctggatatcccgctgctgttcgaatccggattgcaatcgtgggtcgacaaagttctcgtggtgtacgtcgatgatgatgttcagttacgccgccttatggcacgtaacgggtttactgaagaagaagctctgaagcgcattcgttcacagtggcccagtgcggagaaagttaaacgtgcagacgctgtcatcgacaataatggcaatattgaagaaacccgccgccagctgctggacctgttacaccagtgggatctgctggacaagggtggctccggccaccatcatcaccatcac

SEQ ID NO: 1342 - protein, 211 aa, synthetic construct
  REGION 1..211: note = Variant of 3'O-kinase
MAVTIGLTGGIAAGKSTVSAMMRELGLPVIDADEAARAVMKPGEEAYRDIVAAFGPGILRADGEIDRQKLGAIRFSDEQQRKVLNSIVGPAVLKKMLAEKEAHIKSGAKTVVLDIPLLFESGLQSWVDKVLVVYVDDDVQLRRLMARNGFTEEEALKRIRSQWPSAEKVKRADAVIDNNGNIEETRRQLLDLLHQWDLLDKGGSGHHHHHH

SEQ ID NO: 1343 - DNA, 633 bp, synthetic construct
  misc_feature 1..633: note = Variant of 3'O-kinase
  source 1..633: mol_type = other DNA
atggcggttaccattggtttaacaggagggatcgcagcgggcaaatcgactgtgagtgccatgatgcgtgaactgggtctgccggtcatcgatgctgacgaggcagcacgcgccgttatgaagccaggcgaagaagcgtatcgcgacattgtagctgcgttcggtccgggcattcttcgtgcggatggcgagatcgatcgccagaaactgggtgctatccgcttttcggacgaacaacaacgtaaggtgctgaattcgattgtaggtcctgcagtcctgaagaagatgctcgctgagaaagaagctcatatcaagtcaggcgccaagacggttgtgctggatatcccgctgctgttcgaatccggattgcaatcgtgggtcgacaaagttctcgtggtgtacgtcgatgatgatgttcagttacgccgccttatggcacgtaacgggtttactgaagaagaagctctgaagcgcattcgttcacagtggcccagtgcggagaaagttaaacgtgcagacgctgtcatcgacaataatggcactattgaagaaacccgccgccagctgctggacattttacaccagtgggatctgctggacaagggtggctccggccaccatcatcaccatcac

SEQ ID NO: 1344 - protein, 211 aa, synthetic construct
  REGION 1..211: note = Variant of 3'O-kinase
MAVTIGLTGGIAAGKSTVSAMMRELGLPVIDADEAARAVMKPGEEAYRDIVAAFGPGILRADGEIDRQKLGAIRFSDEQQRKVLNSIVGPAVLKKMLAEKEAHIKSGAKTVVLDIPLLFESGLQSWVDKVLVVYVDDDVQLRRLMARNGFTEEEALKRIRSQWPSAEKVKRADAVIDNNGTIEETRRQLLDILHQWDLLDKGGSGHHHHHH

SEQ ID NO: 1345 - DNA, 633 bp, synthetic construct
  misc_feature 1..633: note = Variant of 3'O-kinase
  source 1..633: mol_type = other DNA
atggcggttaccattggtttaacaggagggatcgcagcgggcaaatcgactgtgagtgccatgatgcgtgaactgggtctgccggtcatcgatgctgacgaggcagcacgcgccgttatgaagccaggcgaagaagcgtatcgcgacattgtagctgcgttcggtccgggcattcttcgtgcggatggcgagatcgatcgccagaaactgggtgctatccgcttttcggacgaacaacaacgtaaggtgctgaattcgattgtaggtcctgcagtcctgaagaagatgctcgctgagaaagaagctcatatcaagtcaggcgccaaggctgttgtgctggatatcccgctgctgttcgaatccggattgcaatcgtgggtcgacaaagttctcgtggtgtacgtcgatgatgatgttcagttacgccgccttatggcacgtaacgggtttactgaagaagaagctctgaagcgcattcgttcacagtggcccagtgcggagaaagttaaacgtgcagacgctgtcatcgacaataatggcaatattgaagaaacccgccgccagctgctggacattttacaccagtgggatctgctggacaagggtggctccggccaccatcatcaccatcac

SEQ ID NO: 1346 - protein, 211 aa, synthetic construct
  REGION 1..211: note = Variant of 3'O-kinase
MAVTIGLTGGIAAGKSTVSAMMRELGLPVIDADEAARAVMKPGEEAYRDIVAAFGPGILRADGEIDRQKLGAIRFSDEQQRKVLNSIVGPAVLKKMLAEKEAHIKSGAKAVVLDIPLLFESGLQSWVDKVLVVYVDDDVQLRRLMARNGFTEEEALKRIRSQWPSAEKVKRADAVIDNNGNIEETRRQLLDILHQWDLLDKGGSGHHHHHH

SEQ ID NO: 1347 - DNA, 633 bp, synthetic construct
  misc_feature 1..633: note = Variant of 3'O-kinase
  source 1..633: mol_type = other DNA
atggcggttaccattggtttaacaggagggatcgcagcgggcaaatcgactgtgagtgccatgatgcgtgaactgggtctgccggtcatcgatgctgacgaggcagcacgcgccgttatgaagccaggcgaagaagcgtatcgcgacattgtagctgcgttcggtccgggcattcttcgtgcggatggcgagatcgatcgccagaaactgggtgctatccgcttttcggacgaacaacaacgtaaggtgctgaattcgattgtactgcctgcagtcctgaagaagatgctcgctgagaaagaagctcatatcaagtcaggcgccaagacggttgtgctggatatcccgctgctgttcgaatccggattgcaatcgtgggtcgacaaagttctcgtggtgtacgtcgatgatgatgttcagttacgccgccttatggcacgtaacgggtttactgaagaagaagctctgaagcgcattcgttcacagtggcccagtgcggagaaagttaaacgtgcagacgctgtcatcgacaataatggcaatattgaagaaacccgccgccagctgctggacattttacaccagtgggatctgctggacaagggtggctccggccaccatcatcaccatcac

SEQ ID NO: 1348 - protein, 211 aa, synthetic construct
  REGION 1..211: note = Variant of 3'O-kinase
MAVTIGLTGGIAAGKSTVSAMMRELGLPVIDADEAARAVMKPGEEAYRDIVAAFGPGILRADGEIDRQKLGAIRFSDEQQRKVLNSIVLPAVLKKMLAEKEAHIKSGAKTVVLDIPLLFESGLQSWVDKVLVVYVDDDVQLRRLMARNGFTEEEALKRIRSQWPSAEKVKRADAVIDNNGNIEETRRQLLDILHQWDLLDKGGSGHHHHHH

SEQ ID NO: 1349 - DNA, 633 bp, synthetic construct
  misc_feature 1..633: note = Variant of 3'O-kinase
  source 1..633: mol_type = other DNA
atggcggttaccattggtttaacaggagggatcgcagcgggcaaatcgactgtgagtgccatgatgcgtgaactgggtctgccggtcatcgatgctgacgaggcagcacgcgccgttatgaagccaggcgaagaagcgtatcgcgacattgtagctgcgttcggtccgggcattcttcgtgcggatggcgagatcgatcgccagaaactgggtgctatccgcttttcggacgaacaacaacgtaaggtgctgaattcgattgtaggtcctgcagtcctgaagaagatgctcgctgagaaagaagctcatatcaagtcaggcgccaagacggttgtgctggatatcccgctgctgttcgaatccggattgcaatcgtgggtcgacaaagttctcgtggtgtacgtcgatgatgatgttcagttacgccgccttatggcacgtaacgggtttactgaagaagaagctctgaagcgcattgagtcacagtggcccagtgcggagaaagttaaacgtgcagacgctgtcatcgacaataatggcaatattgaagaaacccgccgccagctgctggacattttacaccagtgggatctgctggacaagggtggctccggccaccatcatcaccatcac

SEQ ID NO: 1350 - protein, 211 aa, synthetic construct
  REGION 1..211: note = Variant of 3'O-kinase
MAVTIGLTGGIAAGKSTVSAMMRELGLPVIDADEAARAVMKPGEEAYRDIVAAFGPGILRADGEIDRQKLGAIRFSDEQQRKVLNSIVGPAVLKKMLAEKEAHIKSGAKTVVLDIPLLFESGLQSWVDKVLVVYVDDDVQLRRLMARNGFTEEEALKRIESQWPSAEKVKRADAVIDNNGNIEETRRQLLDILHQWDLLDKGGSGHHHHHH

SEQ ID NO: 1351 - DNA, 633 bp, synthetic construct
  misc_feature 1..633: note = Variant of 3'O-kinase
  source 1..633: mol_type = other DNA
atggcggttaccattggtttaacaggagggatcgcagcgggcaaatcgactgtgagtgccatgatgcgtgaactgggtctgccggtcatcgatgctgacgaggcagcacgcgccgttatggctccaggcgaagaagcgtatcgcgacattgtagctgcgttcggtccgggcattcttcgtgcggatggcgagatcgatcgccagaaactgggtgctatccgcttttcggacgaacaacaacgtaaggtgctgaattcgattgtaggtcctgcagtcctgaagaagatgctcgctgagaaagaagctcatatcaagtcaggcgccaagacggttgtgctggatatcccgctgctgttcgaatccggattgcaatcgtgggtcgacaaagttctcgtggtgtacgtcgatgatgatgttcagttacgccgccttatggcacgtaacgggtttactgaagaagaagctctgaagcgcattcgttcacagtggcccagtgcggagaaagttaaacgtgcagacgctgtcatcgacaataatggcaatattgaagaaacccgccgccagctgctggacattttacaccagtgggatctgctggacaagggtggctccggccaccatcatcaccatcac

SEQ ID NO: 1352 - protein, 211 aa, synthetic construct
  REGION 1..211: note = Variant of 3'O-kinase
MAVTIGLTGGIAAGKSTVSAMMRELGLPVIDADEAARAVMAPGEEAYRDIVAAFGPGILRADGEIDRQKLGAIRFSDEQQRKVLNSIVGPAVLKKMLAEKEAHIKSGAKTVVLDIPLLFESGLQSWVDKVLVVYVDDDVQLRRLMARNGFTEEEALKRIRSQWPSAEKVKRADAVIDNNGNIEETRRQLLDILHQWDLLDKGGSGHHHHHH

SEQ ID NO: 1353 - DNA, 633 bp, synthetic construct
  misc_feature 1..633: note = Variant of 3'O-kinase
  source 1..633: mol_type = other DNA
atggcggttaccattggtttaacaggagggatcgcagcgggcaaatcgactgtgagtgccatgatgcgtgaactgggtctgccggtcatcgatgctgacgaggcagcacgcgccgttatgaagccaggcgaagaagcgtatcgcgacattgtagctgcgttcggtccgggcattcttcgtgcggatggcgagatcgatcgccagaaactggttgctatccgcttttcggacgaacaacaacgtaaggtgctgaattcgattgtaggtcctgcagtcctgaagaagatgctcgctgagaaagaagctcatatcaagtcaggcgccaagacggttgtgctggatatcccgctgctgttcgaatccggattgcaatcgtgggtcgacaaagttctcgtggtgtacgtcgatgatgatgttcagttacgccgccttatggcacgtaacgggtttactgaagaagaagctctgaagcgcattcgttcacagtggcccagtgcggagaaagttaaacgtgcagacgctgtcatcgacaataatggcaatattgaagaaacccgccgccagctgctggacattttacaccagtgggatctgctggacaagggtggctccggccaccatcatcaccatcac

SEQ ID NO: 1354 - protein, 211 aa, synthetic construct
  REGION 1..211: note = Variant of 3'O-kinase
MAVTIGLTGGIAAGKSTVSAMMRELGLPVIDADEAARAVMKPGEEAYRDIVAAFGPGILRADGEIDRQKLVAIRFSDEQQRKVLNSIVGPAVLKKMLAEKEAHIKSGAKTVVLDIPLLFESGLQSWVDKVLVVYVDDDVQLRRLMARNGFTEEEALKRIRSQWPSAEKVKRADAVIDNNGNIEETRRQLLDILHQWDLLDKGGSGHHHHHH

SEQ ID NO: 1355 - DNA, 633 bp, synthetic construct
  misc_feature 1..633: note = Variant of 3'O-kinase
  source 1..633: mol_type = other DNA
atggcggttaccattggtttaacaggagggatcgcagcgggcaaatcgactgtgagtgccatgatgcgtgaactgggtctgccggtcatcgatgctgacgaggcagcacgcgccgttatgaagccaggcgaagaagcgtatcgcgacattgtagctgcgttcggtccgggcattcttcgtgcggatggcgagatcgatcgccagaaactgggtgctatccgcttttcggacgaacaacaacgtaaggtgctgaattcgattgtaggtcctgcagtcctgaagaagatgctcgctgagaaagaagctcatatcaagtcaggcgccaagacggttgtgctggatatcccgctgctgttcgaatccggattgcaatcgtgggtcgacaaagttctcgtggtgtacgtcgatgatgatgttcagttacgccgccttatggcacgtaacgggtttactgaagaagaagctctgaagcgcattaagtcacagtggcccagtgcggagaaagttaaacgtgcagacgctgtcatcgacaataatggcaatattgaagaaacccgccgccagctgctggacattttacaccagtgggatctgctggacaagggtggctccggccaccatcatcaccatcac

SEQ ID NO: 1356 - protein, 211 aa, synthetic construct
  REGION 1..211: note = Variant of 3'O-kinase
MAVTIGLTGGIAAGKSTVSAMMRELGLPVIDADEAARAVMKPGEEAYRDIVAAFGPGILRADGEIDRQKLGAIRFSDEQQRKVLNSIVGPAVLKKMLAEKEAHIKSGAKTVVLDIPLLFESGLQSWVDKVLVVYVDDDVQLRRLMARNGFTEEEALKRIKSQWPSAEKVKRADAVIDNNGNIEETRRQLLDILHQWDLLDKGGSGHHHHHH

SEQ ID NO: 1357 - DNA, 633 bp, synthetic construct
  misc_feature 1..633: note = Variant of 3'O-kinase
  source 1..633: mol_type = other DNA
atggcggttaccattggtttaacaggagggatcgcagcgggcaaatcgactgtgagtgccatgatgcgtgaactgggtctgccggtcatcgatgctgacgaggcagcacgcgccgttatgaagccaggcgaagaagcgtatcgcgacattgtagctgcgttcggtccgggcattcttcgtgcggatggcgagatcgatcgccagaaactgggtgctatccgcttttcggacgaacaacaacgtaaggtgctgaattcgattgtaggtcctgcagtcctgaagaagatgctcgctgagaaagaagctcatatcaagtcaggcgccaagacggttgtgctggatatcccgctgctgttcgaatccggattgcaatcgtgggtcgacaaagttctcgtggtgtacgtcgatgatgatgttcagttacgccgccttatggcacgtaacgggtttactgaagaagaagctctgaagcgcattcgttcacaggtgcccagtgcggagaaagttaaacgtgcagacgctgtcatcgacaataatggcaatattgaagaaacccgccgccagctgctggacattttacaccagtgggatctgctggacaagggtggctccggccaccatcatcaccatcac

SEQ ID NO: 1358 - protein, 211 aa, synthetic construct
  REGION 1..211: note = Variant of 3'O-kinase
MAVTIGLTGGIAAGKSTVSAMMRELGLPVIDADEAARAVMKPGEEAYRDIVAAFGPGILRADGEIDRQKLGAIRFSDEQQRKVLNSIVGPAVLKKMLAEKEAHIKSGAKTVVLDIPLLFESGLQSWVDKVLVVYVDDDVQLRRLMARNGFTEEEALKRIRSQVPSAEKVKRADAVIDNNGNIEETRRQLLDILHQWDLLDKGGSGHHHHHH

SEQ ID NO: 1359 - DNA, 633 bp, synthetic construct
  misc_feature 1..633: note = Variant of 3'O-kinase
  source 1..633: mol_type = other DNA
atggcggttaccattggtttaacaggagggatcgcagcgggcaaatcgactgtgagtgccatgatgcgtgaactgggtctgccggtcatcgatgctgacgaggcagcacgcgccgttatgaagccaggcgaagaagcgtatcgcgacattgtagctgcgttcggtccgggcattcttcgtgcggatggcgagatcgatcgccagaaactgggtgctatccgcttttcggacgaacaacaacgtaaggtgctgaattcgattgtaggtcctgcagtcctgaagaagatgctcgctgagaaagaagcttgtatcaagtcaggcgccaagacggttgtgctggatatcccgctgctgttcgaatccggattgcaatcgtgggtcgacaaagttctcgtggtgtacgtcgatgatgatgttcagttacgccgccttatggcacgtaacgggtttactgaagaagaagctctgaagcgcattcgttcacagtggcccagtgcggagaaagttaaacgtgcagacgctgtcatcgacaataatggcaatattgaagaaacccgccgccagctgctggacattttacaccagtgggatctgctggacaagggtggctccggccaccatcatcaccatcac

SEQ ID NO: 1360 - protein, 211 aa, synthetic construct
  REGION 1..211: note = Variant of 3'O-kinase
MAVTIGLTGGIAAGKSTVSAMMRELGLPVIDADEAARAVMKPGEEAYRDIVAAFGPGILRADGEIDRQKLGAIRFSDEQQRKVLNSIVGPAVLKKMLAEKEACIKSGAKTVVLDIPLLFESGLQSWVDKVLVVYVDDDVQLRRLMARNGFTEEEALKRIRSQWPSAEKVKRADAVIDNNGNIEETRRQLLDILHQWDLLDKGGSGHHHHHH

SEQ ID NO: 1361 - DNA, 633 bp, synthetic construct
  misc_feature 1..633: note = Variant of 3'O-kinase
  source 1..633: mol_type = other DNA
atggcggttaccattggtttaacaggagggatcgcagcgggcaaatcgactgtgagtgccatgatgcgtgaactgggtctgccggtcatcgatgctgacgaggcagcacgcgccgttatgaagccaggcgaagaagcgtatcgcgacattgtagctgcgttcggtccgggcattcttcgtgcggatggcgagatcgatcgccagaaactgggtgctatccgcttttcggacgaacaacaacgtaaggtgctgaattcgattgtaggtcctgcagtcctgaagaagatgctcgctgagaaagaagctcatatcaagtcaggcgccaagacggttgtgctggatatcccgctgctgttcgaatccggattggcgtcgtgggtcgacaaagttctcgtggtgtacgtcgatgatgatgttcagttacgccgccttatggcacgtaacgggtttactgaagaagaagctctgaagcgcattcgttcacagtggcccagtgcggagaaagttaaacgtgcagacgctgtcatcgacaataatggcaatattgaagaaacccgccgccagctgctggacattttacaccagtgggatctgctggacaagggtggctccggccaccatcatcaccatcac

SEQ ID NO: 1362 - protein, 211 aa, synthetic construct
  REGION 1..211: note = Variant of 3'O-kinase
MAVTIGLTGGIAAGKSTVSAMMRELGLPVIDADEAARAVMKPGEEAYRDIVAAFGPGILRADGEIDRQKLGAIRFSDEQQRKVLNSIVGPAVLKKMLAEKEAHIKSGAKTVVLDIPLLFESGLASWVDKVLVVYVDDDVQLRRLMARNGFTEEEALKRIRSQWPSAEKVKRADAVIDNNGNIEETRRQLLDILHQWDLLDKGGSGHHHHHH

SEQ ID NO: 1363 - DNA, 633 bp, synthetic construct
  misc_feature 1..633: note = Variant of 3'O-kinase
  source 1..633: mol_type = other DNA
atggcggttaccattggtttaacaggagggatcgcagcgggcaaatcgactgtgagttgtatgatgcgtgaactgggtctgccggtcatcgatgctgacgaggcagcacgcgccgttatgaagccaggcgaagaagcgtatcgcgacattgtagctgcgttcggtccgggcattcttcgtgcggatggcgagatcgatcgccagaaactgggtgctatccgcttttcggacgaacaacaacgtaaggtgctgaattcgattgtaggtcctgcagtcctgaagaagatgctcgctgagaaagaagctcatatcaagtcaggcgccaagacggttgtgctggatatcccgctgctgttcgaatccggattgcaatcgtgggtcgacaaagttctcgtggtgtacgtcgatgatgatgttcagttacgccgccttatggcacgtaacgggtttactgaagaagaagctctgaagcgcattcgttcacagtggcccagtgcggagaaagttaaacgtgcagacgctgtcatcgacaataatggcaatattgaagaaacccgccgccagctgctggacattttacaccagtgggatctgctggacaagggtggctccggccaccatcatcaccatcac

SEQ ID NO: 1364 - protein, 211 aa, synthetic construct
  REGION 1..211: note = Variant of 3'O-kinase
MAVTIGLTGGIAAGKSTVSCMMRELGLPVIDADEAARAVMKPGEEAYRDIVAAFGPGILRADGEIDRQKLGAIRFSDEQQRKVLNSIVGPAVLKKMLAEKEAHIKSGAKTVVLDIPLLFESGLQSWVDKVLVVYVDDDVQLRRLMARNGFTEEEALKRIRSQWPSAEKVKRADAVIDNNGNIEETRRQLLDILHQWDLLDKGGSGHHHHHH

SEQ ID NO: 1365 - DNA, 633 bp, synthetic construct
  misc_feature 1..633: note = Variant of 3'O-kinase
  source 1..633: mol_type = other DNA
atggcggttaccattggtttaacaggagggatcgcagcgggcaaatcgactgtgagtgccatgatgcgtgaactgggtctgccggtcatcgatgctgacgaggcagcacgcgccgttatgaagccaggcgaagaagcgtatcgcgacattgtagctgcgttcggtccgggcattcttcgtgcggatggcgagatcgatcgccagaaactgggtgctatccgcttttcggacgaacaacaacgtaaggtgctgaattcgattgtaggtcctgcagtcctgaagtatatgctcgctgagaaagaagctcatatcaagtcaggcgccaagacggttgtgctggatatcccgctgctgttcgaatccggattgcaatcgtgggtcgacaaagttctcgtggtgtacgtcgatgatgatgttcagttacgccgccttatggcacgtaacgggtttactgaagaagaagctctgaagcgcattcgttcacagtggcccagtgcggagaaagttaaacgtgcagacgctgtcatcgacaataatggcaatattgaagaaacccgccgccagctgctggacattttacaccagtgggatctgctggacaagggtggctccggccaccatcatcaccatcac

SEQ ID NO: 1366 - protein, 211 aa, synthetic construct
  REGION 1..211: note = Variant of 3'O-kinase
MAVTIGLTGGIAAGKSTVSAMMRELGLPVIDADEAARAVMKPGEEAYRDIVAAFGPGILRADGEIDRQKLGAIRFSDEQQRKVLNSIVGPAVLKYMLAEKEAHIKSGAKTVVLDIPLLFESGLQSWVDKVLVVYVDDDVQLRRLMARNGFTEEEALKRIRSQWPSAEKVKRADAVIDNNGNIEETRRQLLDILHQWDLLDKGGSGHHHHHH

SEQ ID NO: 1367 - DNA, 633 bp, synthetic construct
  misc_feature 1..633: note = Variant of 3'O-kinase
  source 1..633: mol_type = other DNA
atggcggttaccattggtttaacaggagggatcgcagcgggcaaatcgactgtgagtgccatgatgcgtgaactgggtctgccggtcatcgatgctgacgaggcagcacgcgccgttatgaagccaggcgaagaagcgtatcgcgacattgtagctgcgttcggtccgggcattcttcgtgcggatggcgagatcgatcgccagaaactgggtgctatccgcttttcggacgaacaacaacgtaaggtgctgaattcgattgtaggtcctgcagtcctgaagaagatgctcgctgagaaagaagctcatatcaagtcaggcgccaagacggttgtgctggatatcccgctgctgttcgaatccggattgcaatcgtgggtcgacaaacagctcgtggtgtacgtcgatgatgatgttcagttacgccgccttatggcacgtaacgggtttactgaagaagaagctctgaagcgcattcgttcacagtggcccagtgcggagaaagttaaacgtgcagacgctgtcatcgacaataatggcaatattgaagaaacccgccgccagctgctggacattttacaccagtgggatctgctggacaagggtggctccggccaccatcatcaccatcac

SEQ ID NO: 1368 - protein, 211 aa, synthetic construct
  REGION 1..211: note = Variant of 3'O-kinase
MAVTIGLTGGIAAGKSTVSAMMRELGLPVIDADEAARAVMKPGEEAYRDIVAAFGPGILRADGEIDRQKLGAIRFSDEQQRKVLNSIVGPAVLKKMLAEKEAHIKSGAKTVVLDIPLLFESGLQSWVDKQLVVYVDDDVQLRRLMARNGFTEEEALKRIRSQWPSAEKVKRADAVIDNNGNIEETRRQLLDILHQWDLLDKGGSGHHHHHH

SEQ ID NO: 1369 - DNA, 633 bp, synthetic construct
  misc_feature 1..633: note = Variant of 3'O-kinase
  source 1..633: mol_type = other DNA
atggcggttaccattggtttaacaggagggatcgcagcgggcaaatcgactgtgagtgccatgatgcgtgaactgggtctgccggtcatcgatgctgacgaggcagcacgcgcctgtatgaagccaggcgaagaagcgtatcgcgacattgtagctgcgttcggtccgggcattcttcgtgcggatggcgagatcgatcgccagaaactgggtgctatccgcttttcggacgaacaacaacgtaaggtgctgaattcgattgtaggtcctgcagtcctgaagaagatgctcgctgagaaagaagctcatatcaagtcaggcgccaagacggttgtgctggatatcccgctgctgttcgaatccggattgcaatcgtgggtcgacaaagttctcgtggtgtacgtcgatgatgatgttcagttacgccgccttatggcacgtaacgggtttactgaagaagaagctctgaagcgcattcgttcacagtggcccagtgcggagaaagttaaacgtgcagacgctgtcatcgacaataatggcaatattgaagaaacccgccgccagctgctggacattttacaccagtgggatctgctggacaagggtggctccggccaccatcatcaccatcac

SEQ ID NO: 1370 - protein, 211 aa, synthetic construct
  REGION 1..211: note = Variant of 3'O-kinase
MAVTIGLTGGIAAGKSTVSAMMRELGLPVIDADEAARACMKPGEEAYRDIVAAFGPGILRADGEIDRQKLGAIRFSDEQQRKVLNSIVGPAVLKKMLAEKEAHIKSGAKTVVLDIPLLFESGLQSWVDKVLVVYVDDDVQLRRLMARNGFTEEEALKRIRSQWPSAEKVKRADAVIDNNGNIEETRRQLLDILHQWDLLDKGGSGHHHHHH

SEQ ID NO: 1371 - DNA, 633 bp, synthetic construct
  misc_feature 1..633: note = Variant of 3'O-kinase
  source 1..633: mol_type = other DNA
atggcggttaccattggtttaacaggagggatcgcagcgggcaaatcgactgtgagtgccatgatgcgtgaactgggtctgccggtcatcgatgctgacgaggcagcacgcgccgttatgaagccaggcgaagaagcgtatcgcgacattgtagctgcgttcggtccgggcattcttcgtgcggatggcgagatcgatcgccagaaactgggtgctatccgcttttcggacgaacaacaacgtaaggtgctgaattcgattgtaggtcctgcagtcctgaagaagatgctcgctgagaaagaagctcatatcaagtcaggcgccaagacggttgtgctggatatcccgctgctgttcgaatccggattgcaatcgtgggtcgacaaagttctcgtggtgtacgtcgatgatgatgttcagttacgccgccttatggcacgtaacgggtttactgaagaagaagctctgaagcgcattcgttcacagtggcccagtgcggagaaagttaaacgtgcagacgcttggatcgacaataatggcaatattgaagaaacccgccgccagctgctggacattttacaccagtgggatctgctggacaagggtggctccggccaccatcatcaccatcac

SEQ ID NO: 1372 - protein, 211 aa, synthetic construct
  REGION 1..211: note = Variant of 3'O-kinase
MAVTIGLTGGIAAGKSTVSAMMRELGLPVIDADEAARAVMKPGEEAYRDIVAAFGPGILRADGEIDRQKLGAIRFSDEQQRKVLNSIVGPAVLKKMLAEKEAHIKSGAKTVVLDIPLLFESGLQSWVDKVLVVYVDDDVQLRRLMARNGFTEEEALKRIRSQWPSAEKVKRADAWIDNNGNIEETRRQLLDILHQWDLLDKGGSGHHHHHH

SEQ ID NO: 1373 - DNA, 633 bp, synthetic construct
  misc_feature 1..633: note = Variant of 3'O-kinase
  source 1..633: mol_type = other DNA
atggcggttaccattggtttaacaggagggaaggcagcgggcaaatcgactgtgagtgccatgatgcgtgaactgggtctgccggtcatcgatgctgacgaggcagcacgcgccgttatgaagccaggcgaagaagcgtatcgcgacattgtagctgcgttcggtccgggcattcttcgtgcggatggcgagatcgatcgccagaaactgggtgctatccgcttttcggacgaacaacaacgtaaggtgctgaattcgattgtaggtcctgcagtcctgaagaagatgctcgctgagaaagaagctcatatcaagtcaggcgccaagacggttgtgctggatatcccgctgctgttcgaatccggattgcaatcgtgggtcgacaaagttctcgtggtgtacgtcgatgatgatgttcagttacgccgccttatggcacgtaacgggtttactgaagaagaagctctgaagcgcattcgttcacagtggcccagtgcggagaaagttaaacgtgcagacgctgtcatcgacaataatggcaatattgaagaaacccgccgccagctgctggacattttacaccagtgggatctgctggacaagggtggctccggccaccatcatcaccatcac

SEQ ID NO: 1374 - protein, 211 aa, synthetic construct
  REGION 1..211: note = Variant of 3'O-kinase
MAVTIGLTGGKAAGKSTVSAMMRELGLPVIDADEAARAVMKPGEEAYRDIVAAFGPGILRADGEIDRQKLGAIRFSDEQQRKVLNSIVGPAVLKKMLAEKEAHIKSGAKTVVLDIPLLFESGLQSWVDKVLVVYVDDDVQLRRLMARNGFTEEEALKRIRSQWPSAEKVKRADAVIDNNGNIEETRRQLLDILHQWDLLDKGGSGHHHHHH

SEQ ID NO: 1375 - DNA, 633 bp, synthetic construct
  misc_feature 1..633: note = Variant of 3'O-kinase
  source 1..633: mol_type = other DNA
atggcggttaccattggtttaacaggagggatcgcagcgggcaaatcgactgtgagtgccatgatgcgtgaactgggtctgccggtcatcgatgctgacgaggcagcacgcgccgttatgaagccaggcgaagaagcgtatcgcgacattgtagctgcgttcggtccgggcattcttcgtgcggatggcgagatcgatcgccagaaactgggtgctatccgcttttcggacgaacaacaacgtaaggtgctgaattcgattgtaggtcctgcagtcctgaagaagatgctcgctgagaaagaagctcatatcaagtcaggcgccaagacggttgtgctggatatcccgctgctgttcgaatccggattgcaatcgtgggtcgacaaagttctcgtggtgtacgtcgatgatgatgttcagttacgccgccttatggcacgtaacgggtttactgaagaagaagctctgaagcgcattagttcacagtggcccagtgcggagaaagttaaacgtgcagacgctgtcatcgacaataatggcaatattgaagaaacccgccgccagctgctggacattttacaccagtgggatctgctggacaagggtggctccggccaccatcatcaccatcac

SEQ ID NO: 1376 - protein, 211 aa, synthetic construct
  REGION 1..211: note = Variant of 3'O-kinase
MAVTIGLTGGIAAGKSTVSAMMRELGLPVIDADEAARAVMKPGEEAYRDIVAAFGPGILRADGEIDRQKLGAIRFSDEQQRKVLNSIVGPAVLKKMLAEKEAHIKSGAKTVVLDIPLLFESGLQSWVDKVLVVYVDDDVQLRRLMARNGFTEEEALKRISSQWPSAEKVKRADAVIDNNGNIEETRRQLLDILHQWDLLDKGGSGHHHHHH

SEQ ID NO: 1377 - DNA, 633 bp, synthetic construct
  misc_feature 1..633: note = Variant of 3'O-kinase
  source 1..633: mol_type = other DNA
atggcggttaccattggtttaacaggagggatcgcagcgggcaaatcgactgtgagtgccatgatgcgtgaactgggtctgccggtcatcgatgctgacgaggcagcacgcgccgttatgaagccaggcgaagaagcgtatcgcgacattgtagctgcgttcggtccgggcattcttcgtgcggatggcgagatcgatcgccagaaactgggtgctatccgcttttcggacgaacaacaacgtaaggtgctgaattcgattgtaggtcctgcagtcctgaagaagatgctcgctgagaaagaagctcatatcaagtcaggcgccaagacggttgtgctggatatcccgctgctgttcgaatccggattgcaatcgtgggtcgacaaagttctcgtggtgtacgtcgatgatgatgttcagttacgccgccttatgcatcgtaacgggtttactgaagaagaagctctgaagcgcattcgttcacagtggcccagtgcggagaaagttaaacgtgcagacgctgtcatcgacaataatggcaatattgaagaaacccgccgccagctgctggacattttacaccagtgggatctgctggacaagggtggctccggccaccatcatcaccatcac

SEQ ID NO: 1378 - protein, 211 aa, synthetic construct
  REGION 1..211: note = Variant of 3'O-kinase
MAVTIGLTGGIAAGKSTVSAMMRELGLPVIDADEAARAVMKPGEEAYRDIVAAFGPGILRADGEIDRQKLGAIRFSDEQQRKVLNSIVGPAVLKKMLAEKEAHIKSGAKTVVLDIPLLFESGLQSWVDKVLVVYVDDDVQLRRLMHRNGFTEEEALKRIRSQWPSAEKVKRADAVIDNNGNIEETRRQLLDILHQWDLLDKGGSGHHHHHH

SEQ ID NO: 1379 - DNA, 633 bp, synthetic construct
  misc_feature 1..633: note = Variant of 3'O-kinase
  source 1..633: mol_type = other DNA
atggcggttaccattggtttaacaggagggatcgcagcgggcaaatcgactgtgagtgccatgatgcgtgaactgggtctgccggtcatcgatgctgacgaggcagcacgcgccgttatgaagccaggcgaagaagcgtatcgcgacattgtagctgcgttcggtccgggcattcttcgtgcggatggccgtatcgatcgccagaaactgggtgctatccgcttttcggacgaacaacaacgtaaggtgctgaattcgattgtaggtcctgcagtcctgaagaagatgctcgctgagaaagaagctcatatcaagtcaggcgccaagacggttgtgctggatatcccgctgctgttcgaatccggattgcaatcgtgggtcgacaaagttctcgtggtgtacgtcgatgatgatgttcagttacgccgccttatggcacgtaacgggtttactgaagaagaagctctgaagcgcattcgttcacagtggcccagtgcggagaaagttaaacgtgcagacgctgtcatcgacaataatggcaatattgaagaaacccgccgccagctgctggacattttacaccagtgggatctgctggacaagggtggctccggccaccatcatcaccatcac

SEQ ID NO: 1380 - protein, 211 aa, synthetic construct
  REGION 1..211: note = Variant of 3'O-kinase
MAVTIGLTGGIAAGKSTVSAMMRELGLPVIDADEAARAVMKPGEEAYRDIVAAFGPGILRADGRIDRQKLGAIRFSDEQQRKVLNSIVGPAVLKKMLAEKEAHIKSGAKTVVLDIPLLFESGLQSWVDKVLVVYVDDDVQLRRLMARNGFTEEEALKRIRSQWPSAEKVKRADAVIDNNGNIEETRRQLLDILHQWDLLDKGGSGHHHHHH

SEQ ID NO: 1381 - DNA, 633 bp, synthetic construct
  misc_feature 1..633: note = Variant of 3'O-kinase
  source 1..633: mol_type = other DNA
atggcggttaccattggtttaacaggagggatcgcagcgggcaaatcgactgtgagtgccatgatgcgtgaactgggtctgccggtcatcgatgctgacgaggcagcacgcgccgttatgaagccaggcgaagaagcgtatcgcgacattgtagctgcgttcggtccgggcattcttcgtgcggatggcgagatcgatcgccagaaactgggtgctatccgcttttcggacgaacaacaacgtaaggtgctgaattcgattgtaggtcctgcagtcctgaagaagatgctcgctgagaaagaagctcatatcaagtcaggcgccaagacggttgtgctggatatcccgctgctgttcgaatccggattgcaatcgtgggtcgacaaagttctcgtggtgtactttgatgatgatgttcagttacgccgccttatggcacgtaacgggtttactgaagaagaagctctgaagcgcattcgttcacagtggcccagtgcggagaaagttaaacgtgcagacgctgtcatcgacaataatggcaatattgaagaaacccgccgccagctgctggacattttacaccagtgggatctgctggacaagggtggctccggccaccatcatcaccatcac

SEQ ID NO: 1382 - protein, 211 aa, synthetic construct
  REGION 1..211: note = Variant of 3'O-kinase
MAVTIGLTGGIAAGKSTVSAMMRELGLPVIDADEAARAVMKPGEEAYRDIVAAFGPGILRADGEIDRQKLGAIRFSDEQQRKVLNSIVGPAVLKKMLAEKEAHIKSGAKTVVLDIPLLFESGLQSWVDKVLVVYFDDDVQLRRLMARNGFTEEEALKRIRSQWPSAEKVKRADAVIDNNGNIEETRRQLLDILHQWDLLDKGGSGHHHHHH

SEQ ID NO: 1383 - DNA, 633 bp, synthetic construct
  misc_feature 1..633: note = Variant of 3'O-kinase
  source 1..633: mol_type = other DNA
atggcggttaccattggtttaacaggagggatcgcagcgggcaaatcgactgtgagtgccatgatgcgtgaactgggtctgccggtcatcgatgctgacgaggcagcacgcgccgttatgaagccaggcgaagaagcgtatcgcgacattgtagctgcgttcggtccgggcattcttcgtgcggatggcgagatcgatcgccagaaactgggtgctatccgcttttcggacgaacaacaacgtaaggtgctgaattcgattgtaggtcctgcagtcctgaagcatatgctcgctgagaaagaagctcatatcaagtcaggcgccaagacggttgtgctggatatcccgctgctgttcgaatccggattgcaatcgtgggtcgacaaagttctcgtggtgtacgtcgatgatgatgttcagttacgccgccttatggcacgtaacgggtttactgaagaagaagctctgaagcgcattcgttcacagtggcccagtgcggagaaagttaaacgtgcagacgctgtcatcgacaataatggcaatattgaagaaacccgccgccagctgctggacattttacaccagtgggatctgctggacaagggtggctccggccaccatcatcaccatcac

SEQ ID NO: 1384 - protein, 211 aa, synthetic construct
  REGION 1..211: note = Variant of 3'O-kinase
MAVTIGLTGGIAAGKSTVSAMMRELGLPVIDADEAARAVMKPGEEAYRDIVAAFGPGILRADGEIDRQKLGAIRFSDEQQRKVLNSIVGPAVLKHMLAEKEAHIKSGAKTVVLDIPLLFESGLQSWVDKVLVVYVDDDVQLRRLMARNGFTEEEALKRIRSQWPSAEKVKRADAVIDNNGNIEETRRQLLDILHQWDLLDKGGSGHHHHHH

SEQ ID NO: 1385 - DNA, 633 bp, synthetic construct
  misc_feature 1..633: note = Variant of 3'O-kinase
  source 1..633: mol_type = other DNA
atggcggttaccattggtttaacaggagggatcgcagcgggcaaatcgactgtgagtgccatgatgcgtgaactgggtctgccggtcatcgatgctgacgaggcagcacgcgccgttatgaagccaggcgaagaagcgtatcgcgacattgtagctgcgttcggtccgggcattcttcgtgcggatggcgttatcgatcgccagaaactgggtgctatccgcttttcggacgaacaacaacgtaaggtgctgaattcgattgtaggtcctgcagtcctgaagaagatgctcgctgagaaagaagctcatatcaagtcaggcgccaagacggttgtgctggatatcccgctgctgttcgaatccggattgcaatcgtgggtcgacaaagttctcgtggtgtacgtcgatgatgatgttcagttacgccgccttatggcacgtaacgggtttactgaagaagaagctctgaagcgcattcgttcacagtggcccagtgcggagaaagttaaacgtgcagacgctgtcatcgacaataatggcaatattgaagaaacccgccgccagctgctggacattttacaccagtgggatctgctggacaagggtggctccggccaccatcatcaccatcac

SEQ ID NO: 1386 - protein, 211 aa, synthetic construct
  REGION 1..211: note = Variant of 3'O-kinase
MAVTIGLTGGIAAGKSTVSAMMRELGLPVIDADEAARAVMKPGEEAYRDIVAAFGPGILRADGVIDRQKLGAIRFSDEQQRKVLNSIVGPAVLKKMLAEKEAHIKSGAKTVVLDIPLLFESGLQSWVDKVLVVYVDDDVQLRRLMARNGFTEEEALKRIRSQWPSAEKVKRADAVIDNNGNIEETRRQLLDILHQWDLLDKGGSGHHHHHH

SEQ ID NO: 1387 - DNA, 633 bp, synthetic construct
  misc_feature 1..633: note = Variant of 3'O-kinase
  source 1..633: mol_type = other DNA
atggcggttaccattggtttaacaggagggatcgcagcgggcaaatcgactgtgagtgccatgatgcgtgaactgggtctgccggtcatcgatgctgacgaggcagcacgcgccgttatgaagccaggcgaagaagcgtatcgcgacattgtagctgcgttcggtccgggcattcttcgtgcggatggcgagatcgatcgccagaaactgggtcttatccgcttttcggacgaacaacaacgtaaggtgctgaattcgattgtaggtcctgcagtcctgaagaagatgctcgctgagaaagaagctcatatcaagtcaggcgccaagacggttgtgctggatatcccgctgctgttcgaatccggattgcaatcgtgggtcgacaaagttctcgtggtgtacgtcgatgatgatgttcagttacgccgccttatggcacgtaacgggtttactgaagaagaagctctgaagcgcattcgttcacagtggcccagtgcggagaaagttaaacgtgcagacgctgtcatcgacaataatggcaatattgaagaaacccgccgccagctgctggacattttacaccagtgggatctgctggacaagggtggctccggccaccatcatcaccatcac

SEQ ID NO: 1388 - protein, 211 aa, synthetic construct
  REGION 1..211: note = Variant of 3'O-kinase
MAVTIGLTGGIAAGKSTVSAMMRELGLPVIDADEAARAVMKPGEEAYRDIVAAFGPGILRADGEIDRQKLGLIRFSDEQQRKVLNSIVGPAVLKKMLAEKEAHIKSGAKTVVLDIPLLFESGLQSWVDKVLVVYVDDDVQLRRLMARNGFTEEEALKRIRSQWPSAEKVKRADAVIDNNGNIEETRRQLLDILHQWDLLDKGGSGHHHHHH

SEQ ID NO: 1389 - DNA, 633 bp, synthetic construct
  misc_feature 1..633: note = Variant of 3'O-kinase
  source 1..633: mol_type = other DNA
atggcggttaccattggtttaacaggagggatcgcagcgggcaaatcgactgtgagtgccatgatgcgtgaactgggtctgccggtcatcgatgctgacgaggcagcacgcgccgttatgaagccaggcgaagaagcgtatcgcgacattgtagctgcgttcggtccgggcattcttcgtgcggatggcgagatcgatcgccagaaactgggtgctatccgcttttcggacgaacaacaacgtaaggtgctgaattcgattgtaggtcctgcagtcctgaagaagatgctcgctgagaaagaagctcatatcaagtcaggcgccaagacggttgtgctggatatcccgctgctgttcgaatccggattgcaatcgtgggtcgacaaagttctcgtggtgtacgtcgatgatgatgttcagttacgccgccttatggcacgtgtggggtttactgaagaagaagctctgaagcgcattcgttcacagtggcccagtgcggagaaagttaaacgtgcagacgctgtcatcgacaataatggcaatattgaagaaacccgccgccagctgctggacattttacaccagtgggatctgctggacaagggtggctccggccaccatcatcaccatcac

SEQ ID NO: 1390 - protein, 211 aa, synthetic construct
  REGION 1..211: note = Variant of 3'O-kinase
MAVTIGLTGGIAAGKSTVSAMMRELGLPVIDADEAARAVMKPGEEAYRDIVAAFGPGILRADGEIDRQKLGAIRFSDEQQRKVLNSIVGPAVLKKMLAEKEAHIKSGAKTVVLDIPLLFESGLQSWVDKVLVVYVDDDVQLRRLMARVGFTEEEALKRIRSQWPSAEKVKRADAVIDNNGNIEETRRQLLDILHQWDLLDKGGSGHHHHHH

SEQ ID NO: 1391 - DNA, 633 bp, synthetic construct
  misc_feature 1..633: note = Variant of 3'O-kinase
  source 1..633: mol_type = other DNA
atggcggttaccattggtttaacaggagggatcgcagcgggcaaatcgactgtgagtgccatgatgcgtgaactgggtctgccggtcatcgatgctgacgaggcagcacgcgccgttatgaagccaggcgaagaagcgtatcgcgacattgtagctgcgttcggtccgggcattcttcgtgcggatggcgagatcgatcgccagaaactgggtgctatccgcttttcggacgaacaacaacgtaaggtgctgaattcgattgtaggtcctgcagtcctgaagaagatgctcgctgagaaagaagctcatatcaagtcaggcgccaagacggttgtgctggatatcccgctgctgttcgaatccggattgcaatcgtgggtcgacaaagttctcgtggtgtacgtcgatgatgatgttcagttacgccgccttatggcacgtaacgggtttactgaagaagaagctctgaagcgcattcgttcacagtggcccagtgcggagaaagttaaacgtgcagacgctgtcatcgacaataatggcaatccggaagaaacccgccgccagctgctggacattttacaccagtgggatctgctggacaagggtggctccggccaccatcatcaccatcac

SEQ ID NO: 1392 - protein, 211 aa, synthetic construct
  REGION 1..211: note = Variant of 3'O-kinase
MAVTIGLTGGIAAGKSTVSAMMRELGLPVIDADEAARAVMKPGEEAYRDIVAAFGPGILRADGEIDRQKLGAIRFSDEQQRKVLNSIVGPAVLKKMLAEKEAHIKSGAKTVVLDIPLLFESGLQSWVDKVLVVYVDDDVQLRRLMARNGFTEEEALKRIRSQWPSAEKVKRADAVIDNNGNPEETRRQLLDILHQWDLLDKGGSGHHHHHH

SEQ ID NO: 1393 - DNA, 633 bp, synthetic construct
  misc_feature 1..633: note = Variant of 3'O-kinase
  source 1..633: mol_type = other DNA
atggcggttaccattggtttaacaggagggatcgcagcgggcaaatcgactgtgagtgccatgatgcgtgaactgggtctgccggtcatcgatgctgacgaggcagcacgcgccgttatgaagccaggcgaagaagcgtatcgcgacattgtagctgcgttcggtccgggcattcttcgtgcggatggcgagatcgatcgccagaaactgggtgctatccgcttttcggacgaacaacaacgtaaggtgctgaattcgattgtaggtcctgcagtcctgaagaagatgctcgctgagaaagaagctcatatcaagtcaggcgccaagacggttgtgctggatatcccgctgctgttcgaatccggattgcaatcgtgggtcgacaaagttctcgtggtgtacgtcgatgatgatgttcagttacgccgccttatggcacgtaacgggtttactgaagaagaagctctgaagcgcattcgttcacagtggcccagtgcggagaaagttaaacgtgcagacgctgtcatcgacaataatggcgttattgaagaaacccgccgccagctgctggacattttacaccagtgggatctgctggacaagggtggctccggccaccatcatcaccatcac

SEQ ID NO: 1394 - protein, 211 aa, synthetic construct
  REGION 1..211: note = Variant of 3'O-kinase
MAVTIGLTGGIAAGKSTVSAMMRELGLPVIDADEAARAVMKPGEEAYRDIVAAFGPGILRADGEIDRQKLGAIRFSDEQQRKVLNSIVGPAVLKKMLAEKEAHIKSGAKTVVLDIPLLFESGLQSWVDKVLVVYVDDDVQLRRLMARNGFTEEEALKRIRSQWPSAEKVKRADAVIDNNGVIEETRRQLLDILHQWDLLDKGGSGHHHHHH

SEQ ID NO: 1395 - DNA, 633 bp, synthetic construct
  misc_feature 1..633: note = Variant of 3'O-kinase
  source 1..633: mol_type = other DNA
atggcggttaccattggtttaacaggatctatcgcagcgggcaaatcgactgtgagtgccatgatgcgtgaactgggtctgccggtcatcgatgctgacgaggcagcacgcgccgttatgaagccaggcgaagaagcgtatcgcgacattgtagctgcgttcggtccgggcattcttcgtgcggatggcgagatcgatcgccagaaactgggtgctatccgcttttcggacgaacaacaacgtaaggtgctgaattcgattgtaggtcctgcagtcctgaagaagatgctcgctgagaaagaagctcatatcaagtcaggcgccaagacggttgtgctggatatcccgctgctgttcgaatccggattgcaatcgtgggtcgacaaagttctcgtggtgtacgtcgatgatgatgttcagttacgccgccttatggcacgtaacgggtttactgaagaagaagctctgaagcgcattcgttcacagtggcccagtgcggagaaagttaaacgtgcagacgctgtcatcgacaataatggcaatattgaagaaacccgccgccagctgctggacattttacaccagtgggatctgctggacaagggtggctccggccaccatcatcaccatcac

SEQ ID NO: 1396 - protein, 211 aa, synthetic construct
  REGION 1..211: note = Variant of 3'O-kinase
MAVTIGLTGSIAAGKSTVSAMMRELGLPVIDADEAARAVMKPGEEAYRDIVAAFGPGILRADGEIDRQKLGAIRFSDEQQRKVLNSIVGPAVLKKMLAEKEAHIKSGAKTVVLDIPLLFESGLQSWVDKVLVVYVDDDVQLRRLMARNGFTEEEALKRIRSQWPSAEKVKRADAVIDNNGNIEETRRQLLDILHQWDLLDKGGSGHHHHHH

SEQ ID NO: 1397 - DNA, 633 bp, synthetic construct
  misc_feature 1..633: note = Variant of 3'O-kinase
  source 1..633: mol_type = other DNA
atggcggttaccattggtttaacaggagggatcgcagcgggcaaatcgactgtgagtgccatgatgcgtgaactgggtctgccggtcatcgatgctgacgaggcagcacgcgccgttatgaagccaggcgaagaagcgtatcgcgacattgtagctgcgttcggtccgggcattcttcgtgcggatggcgagatcgatcgccagaaactgggtgctatccgcttttcggacgaacaacaacgtaaggtgctgaattcgattgtaggtcctgcagtcctgaagaagacgctcgctgagaaagaagctcatatcaagtcaggcgccaagacggttgtgctggatatcccgctgctgttcgaatccggattgcaatcgtgggtcgacaaagttctcgtggtgtacgtcgatgatgatgttcagttacgccgccttatggcacgtaacgggtttactgaagaagaagctctgaagcgcattcgttcacagtggcccagtgcggagaaagttaaacgtgcagacgctgtcatcgacaataatggcaatattgaagaaacccgccgccagctgctggacattttacaccagtgggatctgctggacaagggtggctccggccaccatcatcaccatcac

SEQ ID NO: 1398 - protein, 211 aa, synthetic construct
  REGION 1..211: note = Variant of 3'O-kinase
MAVTIGLTGGIAAGKSTVSAMMRELGLPVIDADEAARAVMKPGEEAYRDIVAAFGPGILRADGEIDRQKLGAIRFSDEQQRKVLNSIVGPAVLKKTLAEKEAHIKSGAKTVVLDIPLLFESGLQSWVDKVLVVYVDDDVQLRRLMARNGFTEEEALKRIRSQWPSAEKVKRADAVIDNNGNIEETRRQLLDILHQWDLLDKGGSGHHHHHH

SEQ ID NO: 1399 - DNA, 633 bp, synthetic construct
  misc_feature 1..633: note = Variant of 3'O-kinase
  source 1..633: mol_type = other DNA
atggcggttaccattggtttaacaggagggatcgcagcgggcaaatcgactgtgagtgccatgatgcgtgaactgggtctgccggtcatcgatgctgacgaggcagcacgcgccgttatgaagccaggcgaagaagcgtatcgcgacattgtagctgcgttcggtccgggcattcttcgtgcggatggcgagatcgatcgccagaaactgggtgctatccgcttttcggacgaacaacaacgtaaggtgctgaattcgattgtaggtcctgcagtcctgaagaagatgctcgctgagaaagaagctcatatcaagtcaggcgccaagacggttgtgctggatatcccgctgctgttcgaatccggattgcaatcgtgggtcgacaaagttctcgtggtgtacgtcgatgatgatgttcagttacgccgccttatggcacgtaacgggtttactgaagaagaagctctgaagcgcattcgttcacagtggcccagtgcggagaaagttaaacgtgcagacgctgtcatcgacatgaatggcaatattgaagaaacccgccgccagctgctggacattttacaccagtgggatctgctggacaagggtggctccggccaccatcatcaccatcac

SEQ ID NO: 1400 - protein, 211 aa, synthetic construct
  REGION 1..211: note = Variant of 3'O-kinase
MAVTIGLTGGIAAGKSTVSAMMRELGLPVIDADEAARAVMKPGEEAYRDIVAAFGPGILRADGEIDRQKLGAIRFSDEQQRKVLNSIVGPAVLKKMLAEKEAHIKSGAKTVVLDIPLLFESGLQSWVDKVLVVYVDDDVQLRRLMARNGFTEEEALKRIRSQWPSAEKVKRADAVIDMNGNIEETRRQLLDILHQWDLLDKGGSGHHHHHH

SEQ ID NO: 1401 - DNA, 633 bp, synthetic construct
  misc_feature 1..633: note = Variant of 3'O-kinase
  source 1..633: mol_type = other DNA
atggcggttaccattggtttaacaggagggatcgcagcgggcaaatcgactgtgagtgccatgatgcgtgaactgggtctgccggtcatcgatgctgacgaggcagcacgctctgttatgaagccaggcgaagaagcgtatcgcgacattgtagctgcgttcggtccgggcattcttcgtgcggatggcgagatcgatcgccagaaactgggtgctatccgcttttcggacgaacaacaacgtaaggtgctgaattcgattgtaggtcctgcagtcctgaagaagatgctcgctgagaaagaagctcatatcaagtcaggcgccaagacggttgtgctggatatcccgctgctgttcgaatccggattgcaatcgtgggtcgacaaagttctcgtggtgtacgtcgatgatgatgttcagttacgccgccttatggcacgtaacgggtttactgaagaagaagctctgaagcgcattcgttcacagtggcccagtgcggagaaagttaaacgtgcagacgctgtcatcgacaataatggcaatattgaagaaacccgccgccagctgctggacattttacaccagtgggatctgctggacaagggtggctccggccaccatcatcaccatcac

SEQ ID NO: 1402 - protein, 211 aa, synthetic construct
  REGION 1..211: note = Variant of 3'O-kinase
MAVTIGLTGGIAAGKSTVSAMMRELGLPVIDADEAARSVMKPGEEAYRDIVAAFGPGILRADGEIDRQKLGAIRFSDEQQRKVLNSIVGPAVLKKMLAEKEAHIKSGAKTVVLDIPLLFESGLQSWVDKVLVVYVDDDVQLRRLMARNGFTEEEALKRIRSQWPSAEKVKRADAVIDNNGNIEETRRQLLDILHQWDLLDKGGSGHHHHHH

SEQ ID NO: 1403 - DNA, 633 bp, synthetic construct
  misc_feature 1..633: note = Variant of 3'O-kinase
  source 1..633: mol_type = other DNA
atggcggtcaccattggtttaacaggagggatcgcagcgggcaaatcgactgtgagtgccatgatgcgtgaactgggtctgccggtcatcgatgctgacgaggcagctcgcgccgttatgaagccaggcgaagaagcgtatcgcgacattgtagctgaattcggtccgggcctgcttcgtgaagatggcgagatcgatcgccagaaactgggtgctatccgcttttcggacgaacaacaacgtaaggtgctgaattcgattgtaggtcctgcagtcctgaagaagatgctcgctgagtgggaagctcatatcgggtcaggcgccaagacggttgtgctggatatcccgctgctgttcgaatccggattgcaatcgatggtcgacaaagttctcgtggtgtacgtcgatgatgatgttcagttacgccgccttatggcacgtaacgggtttactgaagaagaagctctgaagcgcattcgttcacagtggcccagtgcggagaaagttaaacgtgcagacgctgtcatcgacaataatggcaatattgaagaaacccgccgccagctgctggacattttacaccagtgggatctgctggacaagggtggctccggccaccatcatcaccatcac

SEQ ID NO: 1404 - protein, 211 aa, synthetic construct
  REGION 1..211: note = Variant of 3'O-kinase
MAVTIGLTGGIAAGKSTVSAMMRELGLPVIDADEAARAVMKPGEEAYRDIVAEFGPGLLREDGEIDRQKLGAIRFSDEQQRKVLNSIVGPAVLKKMLAEWEAHIGSGAKTVVLDIPLLFESGLQSMVDKVLVVYVDDDVQLRRLMARNGFTEEEALKRIRSQWPSAEKVKRADAVIDNNGNIEETRRQLLDILHQWDLLDKGGSGHHHHHH

SEQ ID NO: 1405 - DNA, 633 bp, synthetic construct
  misc_feature 1..633: note = Variant of 3'O-kinase
  source 1..633: mol_type = other DNA
atggcggacaccattggtttaacaggagggatcgcagcgggcaaatcgactgtgagtgccatgatgcgtgaagcgggtctgccggtgatcgatgctgacgaggcagctcgcgccgttatgaagccaggcgaagaagcgtatcgcgacattgtagctgaattcggtccgggcattcttcgtgcagatggcgagatcgatcgccagaaactgggtgctatccgcttttcggacgaacaacaacgtaaggtgctgaattcgattgtaggtcctgcagtcctgaagaagatgctcgctgagtgggaagctcatatcgggtcaggcgccaagacggttgtgctggatatcccgctgctgttcgaatccggattgcaatcgatggtcgacaaagttctcgtggtgtacgtcgatgatgatgttcagttacgccgccttatggcacgtaacgggtttactgaagaagaagctctgaagcgcattcgttcacagtggcccagtgcggagaaagttaaacgtgcagacgctgtcatcgacaataatggcaatattgaagaaacccgccgccagctgctggacattttacaccagtgggatctgctggacaagggtggctccggccaccatcatcaccatcac

SEQ ID NO: 1406 - protein, 211 aa, synthetic construct
  REGION 1..211: note = Variant of 3'O-kinase
MADTIGLTGGIAAGKSTVSAMMREAGLPVIDADEAARAVMKPGEEAYRDIVAEFGPGILRADGEIDRQKLGAIRFSDEQQRKVLNSIVGPAVLKKMLAEWEAHIGSGAKTVVLDIPLLFESGLQSMVDKVLVVYVDDDVQLRRLMARNGFTEEEALKRIRSQWPSAEKVKRADAVIDNNGNIEETRRQLLDILHQWDLLDKGGSGHHHHHH

SEQ ID NO: 1407 - DNA, 633 bp, synthetic construct
  misc_feature 1..633: note = Variant of 3'O-kinase
  source 1..633: mol_type = other DNA
atggcggttaccattggtttaacaggagggatcgcagcgggcaaatcgactgtgagtgccatgatgcgtgaactgggtctgccggtcatcgatgctgacgaggcagcacgcgccgttatgaagccaggcgaagaagcgtatcgcgacattgtagctgaattcggtccgggcatccttcgtgcggatggcgagatcgatcgccagaaactgggtgctatccgcttttcggacgaacaacaacgtaaggtgctgaattcgattgtaggtcctgcagtcctgaagaagatgctcgctgagtgggaagctcatatcgggtcaggcgccaagacggttgtgctggatatcccgctgctgttcgaatccggattgcaatcgtgggtggacaaagttctcgtggtgtacgtcgatgatgatgttcagttacgccgccttatggcacgtaacgggtttactgaagaagaagctctgaagcgcattcgttcacagtggcccagtgcggataaagttaaactggcagccgctgtcatcgacaataatggcaatattgaagaaacccgccgccagctgctggacattttacaccagtgggatctgctggacaagggtggctccggccaccatcatcaccatcac

SEQ ID NO: 1408 - protein, 211 aa, synthetic construct
  REGION 1..211: note = Variant of 3'O-kinase
MAVTIGLTGGIAAGKSTVSAMMRELGLPVIDADEAARAVMKPGEEAYRDIVAEFGPGILRADGEIDRQKLGAIRFSDEQQRKVLNSIVGPAVLKKMLAEWEAHIGSGAKTVVLDIPLLFESGLQSWVDKVLVVYVDDDVQLRRLMARNGFTEEEALKRIRSQWPSADKVKLAAAVIDNNGNIEETRRQLLDILHQWDLLDKGGSGHHHHHH

SEQ ID NO: 1409 - DNA, 633 bp, synthetic construct
  misc_feature 1..633: note = Variant of 3'O-kinase
  source 1..633: mol_type = other DNA
atggcggtcaccattggtttaacaggagggatcgcagcgggcaaatcgactgtgagtgccatgatgcgtgaagcgggtctgccggtgatcgatgctgacgaggcagctcgcgccgttatgaagccaggcgaagaagcgtatcgcgacattgtagctgaattcggtccgggcctgcttctggcagatggcgagatcgatcgccagaaactgggtgctatccgcttttcggacgaacaacaacgtaaggtgctgaattcgattgtaggtcctgcagtcctgaagaagatgctcgctgagtgggaagctcatatcgggtcaggcgccaagacggttgtgctggatatcccgctgctgttcgaatccggattgcaatcgtgggtcgacaaagttctcgtggtgtacgtcgatgatgatgttcagttacgccgccttatggcacgtaacgggtttactgaagaagaagctctgaagcgcattcgttcacagtggcccagtgcggagaaagttaaacgtgcagacgctgtcatcgacaataatggcaatattgaagaaacccgccgccagctgctggacattttacaccagtgggatctgctggacaagggtggctccggccaccatcatcaccatcac

SEQ ID NO: 1410 - protein, 211 aa, synthetic construct
  REGION 1..211: note = Variant of 3'O-kinase
MAVTIGLTGGIAAGKSTVSAMMREAGLPVIDADEAARAVMKPGEEAYRDIVAEFGPGLLLADGEIDRQKLGAIRFSDEQQRKVLNSIVGPAVLKKMLAEWEAHIGSGAKTVVLDIPLLFESGLQSWVDKVLVVYVDDDVQLRRLMARNGFTEEEALKRIRSQWPSAEKVKRADAVIDNNGNIEETRRQLLDILHQWDLLDKGGSGHHHHHH

SEQ ID NO: 1411 - DNA, 633 bp, synthetic construct
  misc_feature 1..633: note = Variant of 3'O-kinase
  source 1..633: mol_type = other DNA
atggcggttaccattggtttaacaggagggatcgcagcgggcaaatcgactgtgagtgccatgatgcgtgaactgggtctgccggtcatcgatgctgacgaggcagcacgcgccgttatgaagccaggcgaagaagcgtatcgcgacattgtagctgaattcgggccgggcatccttcgtgcggatggcgagatcgatcgccagaaactgggtgctatccgcttttcggacgaacaacaacgtaaggtgctgaattcgattgtaggtcctgcagtcctgaagaagatgctcgcggagtgggaagctcatatcgggtcaggcgccaagacggttgtgctggatatcccgctgctgttcgaatccggattgcaatcgtggatggacaaagttctcgtggtgtacgtcgatgatgatgttcagttacgccgccttatggcacgtaacgggtttactgaagaagaagctctgaagcgcattcgttcacagtggcccagtgcggagaaagttaaacgtgcagacgctgtcatcgacaataatggcaatattgaagaaacccgccgccagctgctggacattttacaccagtgggatctgctggacaaaggtggctccggccaccatcatcaccatcac

SEQ ID NO: 1412 - protein, 211 aa, synthetic construct
  REGION 1..211: note = Variant of 3'O-kinase
MAVTIGLTGGIAAGKSTVSAMMRELGLPVIDADEAARAVMKPGEEAYRDIVAEFGPGILRADGEIDRQKLGAIRFSDEQQRKVLNSIVGPAVLKKMLAEWEAHIGSGAKTVVLDIPLLFESGLQSWMDKVLVVYVDDDVQLRRLMARNGFTEEEALKRIRSQWPSAEKVKRADAVIDNNGNIEETRRQLLDILHQWDLLDKGGSGHHHHHH

SEQ ID NO: 1413 - DNA, 633 bp, synthetic construct
  misc_feature 1..633: note = Variant of 3'O-kinase
  source 1..633: mol_type = other DNA
atggcggtcaccattggtttaacaggagggatcgcagcgggcaaatcgactgtgagtgccatgatgcgtgaaatgggtctgccggtgatcgatgctgacgaggcagctcgcgccgttatgaagccaggctgtgaagcgtatcgcgacattgtagctgaattcggtccgggctgccttcgtgcagatggcgagatcgatcgccagaaactgggtgctatccgcttttcggacgaacaacaacgtaaggtgctgaattcgattgtaggtcctgcagtcctgaagaagatgctcgctgagtgggaagctcatatcgggtcaggcgccaagacggttgtgctggatatcccgctgctgttcgaatccggattgcaatcgtgggtcgacaaagttctcgtggtgtacgtcgatgatgatgttcagttacgccgccttatggcacgtaacgggtttactgaagaagaagctctgaagcgcattcgttcacagtggcccagtgcggagaaagttaaacgtgcagacgctgtcatcgacaataatggcaatattgaagaaacccgccgccagctgctggacattttacaccagtgggatctgctggacaagggtggctccggccaccatcatcaccatcac

SEQ ID NO: 1414 - protein, 211 aa, synthetic construct
  REGION 1..211: note = Variant of 3'O-kinase
MAVTIGLTGGIAAGKSTVSAMMREMGLPVIDADEAARAVMKPGCEAYRDIVAEFGPGCLRADGEIDRQKLGAIRFSDEQQRKVLNSIVGPAVLKKMLAEWEAHIGSGAKTVVLDIPLLFESGLQSWVDKVLVVYVDDDVQLRRLMARNGFTEEEALKRIRSQWPSAEKVKRADAVIDNNGNIEETRRQLLDILHQWDLLDKGGSGHHHHHH

SEQ ID NO: 1415 - DNA, 633 bp, synthetic construct
  misc_feature 1..633: note = Variant of 3'O-kinase
  source 1..633: mol_type = other DNA
atggcggacaccattggtttaacaggagggatcgcagcgggcaaatcgactgtgagtgccatgatgcgtgaagcgggtctgccggcgatcgatgctgacgaggcagctcgcgccgttatgaagccaggcgaagaagcgtatcgcgacattgtagctgaattcggtccgggcattctttgtgcagatggcgagatcgatcgccagaaactgggtgctatccgcttttcggacgaacaacaacgtaaggtgctgaattcgattgtaggtcctgcagtcctgaagaagatgctcgctgagtgggaagctcatatcgggtcaggcgccaagacggttgtgctggatatcccgctgctgttcgaatccggattgcaatcgtgggtcgacaaagttctcgtggtgtacgtcgatgatgatgttcagttacgccgccttatggcacgtaacgggtttactgaagaagaagctctgaagcgcattcgttcacagtggcccagtgcggagaaagttgctcgtgcagacgctgtcatcgacaataatggcaatattgaagaaacccgccgccagctgctggacattttacaccagtgggatctgctggacaagggtggctccggccaccatcatcaccatcac

SEQ ID NO: 1416 - protein, 211 aa, synthetic construct
  REGION 1..211: note = Variant of 3'O-kinase
MADTIGLTGGIAAGKSTVSAMMREAGLPAIDADEAARAVMKPGEEAYRDIVAEFGPGILCADGEIDRQKLGAIRFSDEQQRKVLNSIVGPAVLKKMLAEWEAHIGSGAKTVVLDIPLLFESGLQSWVDKVLVVYVDDDVQLRRLMARNGFTEEEALKRIRSQWPSAEKVARADAVIDNNGNIEETRRQLLDILHQWDLLDKGGSGHHHHHH

SEQ ID NO: 1417 - DNA, 633 bp, synthetic construct
  misc_feature 1..633: note = Variant of 3'O-kinase
  source 1..633: mol_type = other DNA
atggcggacaccattggtttaacaggagggatcgcagcgggcaaatcgactgtgagtgccatgatgcgtgaagcgggtctgccggcgatcgatgctgacgaggcagcacgcgccgttatgaagccaggcgaagaagcgtatcgcgacattgtagctgaattcggtccgggcatccttcgtgcggatggcgagatcgatcgccagaaactgggtgctatccgcttttcggacgaacaacaacgtaaggtgctgaattcgattgtaggtcctgcagtcctgaagaagatgctcgctgagtgggaagctcatatcgggtcaggcgccaagacggttgtgctggatatcccgctgctgttcgaatccggattgcaatcggtggtcgacaaagttctcgtggtgtacgtcgatgatgatgttcagttacgccgccttatggcacgtaacgggtttactgaagaagaagctctgaagcgcattcgttcacagtggcccagtgcggagaaagttaaacgtgcagacgctgtcatcgacaataatggcaatattgaagaaacccgccgccagctgctggacattttacaccagtgggatctgctggacaagggtggctccggccaccatcatcaccatcac

SEQ ID NO: 1418 - protein, 211 aa, synthetic construct
  REGION 1..211: note = Variant of 3'O-kinase
MADTIGLTGGIAAGKSTVSAMMREAGLPAIDADEAARAVMKPGEEAYRDIVAEFGPGILRADGEIDRQKLGAIRFSDEQQRKVLNSIVGPAVLKKMLAEWEAHIGSGAKTVVLDIPLLFESGLQSVVDKVLVVYVDDDVQLRRLMARNGFTEEEALKRIRSQWPSAEKVKRADAVIDNNGNIEETRRQLLDILHQWDLLDKGGSGHHHHHH

SEQ ID NO: 1419 - DNA, 633 bp, synthetic construct
  misc_feature 1..633: note = Variant of 3'O-kinase
  source 1..633: mol_type = other DNA
atggcggacaccattggtttaacaggagggatcgcagcgggcaaatcgactgtgagtgccatgatgcgtgaactgggtctgccggtgatcgatgctgacgaggcagcacgcgccgttatgaagccaggctgtgaagcgtatcgcgacattgtagctgaattcggtccgggcatccttcgtgcggatggcgagatcgatcgccagaaactgggtgctatccgcttttcggacgaacaacaacgtaaggtgctgaattcgattgtaggtcctgcagtcctgaagaagatgctcgctgagtgggaagctcatatcgggtcaggcgccaagacggttgtgctggatatcccgctgctgttcgaatccggattgcaatcgatggtcgacaaagttctcgtggtgtacgtcgatgatgatgttcagttacgccgccttatggcacgtaacgggtttactgaagaagaagctctgaagcgcattcgttcacagtggcccagtgcggagaaagttgctcgtgcagacgctgtcatcgacaataatggcaatattgaagaaacccgccgccagctgctggacattttacaccagtgggatctgctggacaagggtggctccggccaccatcatcaccatcac

SEQ ID NO: 1420 - protein, 211 aa, synthetic construct
  REGION 1..211: note = Variant of 3'O-kinase
MADTIGLTGGIAAGKSTVSAMMRELGLPVIDADEAARAVMKPGCEAYRDIVAEFGPGILRADGEIDRQKLGAIRFSDEQQRKVLNSIVGPAVLKKMLAEWEAHIGSGAKTVVLDIPLLFESGLQSMVDKVLVVYVDDDVQLRRLMARNGFTEEEALKRIRSQWPSAEKVARADAVIDNNGNIEETRRQLLDILHQWDLLDKGGSGHHHHHH

SEQ ID NO: 1421 - DNA, 633 bp, synthetic construct
  misc_feature 1..633: note = Variant of 3'O-kinase
  source 1..633: mol_type = other DNA
atggcggtcaccattggtttaacaggagggatcgcagcgggcaaatcgactgtgagtgccatgatgcgtgaactgggtctgccggtcatcgatgctgacgaggcagcacgcgccgttatgaagccaggcgaagaagcgtatcgcgacattgtagctgaattcggtccgggcattcttcgtgcggatggcgagatcgatcgccagaaactgggtgctatccgcttttcggacgaacaacaacgtaaggtgctgaattcgattgtaggtcctgcagtcctgaagaagatgctcgctgagtgggaagctcatatcgggtcaggcgccaagacggttgtgctggatatcccgctgctgttcgaatccggattgcaatcgtgggtcgacaaagttctcgtggtgtacgtcgatgatgatgttcagttacgccgccttatggcacgtaacgggtttactgaagaagaagctctgaagcgcattcgttcacagtggcccagtgcggagaaagttgctcgtgcagacgctgtcatcgacaataatggcaatattgaagaaacccgccgccagctgctggacattttacaccagtgggatctgctggacaagggtggctccggccaccatcatcaccatcac

SEQ ID NO: 1422 - protein, 211 aa, synthetic construct
  REGION 1..211: note = Variant of 3'O-kinase
MAVTIGLTGGIAAGKSTVSAMMRELGLPVIDADEAARAVMKPGEEAYRDIVAEFGPGILRADGEIDRQKLGAIRFSDEQQRKVLNSIVGPAVLKKMLAEWEAHIGSGAKTVVLDIPLLFESGLQSWVDKVLVVYVDDDVQLRRLMARNGFTEEEALKRIRSQWPSAEKVARADAVIDNNGNIEETRRQLLDILHQWDLLDKGGSGHHHHHH

SEQ ID NO: 1423 - DNA, 633 bp, synthetic construct
  misc_feature 1..633: note = Variant of 3'O-kinase
  source 1..633: mol_type = other DNA
atggcggtcaccattggtttaacaggagggatcgcagcgggcaaatcgactgtgagtgccatgatgcgtgaactgggtctgccggtgatcgatgctgacgaggcagcacgcgccgttatgaagccaggcgacgaagcgtatcgcgacattgtagctgaattcggtccgggcctgcttctggaagatggcgagatcgatcgccagaaactgggtgctatccgcttttcggacgaacaacaacgtaaggtgctgaattcgattgtaggtcctgcagtcctgaagaagatgctcgctgagtgggaagctcatatcgggtcaggcgccaagacggttgtgctggatatcccgctgctgttcgaatccggattgcaatcgtgcgtcgacaaagttctcgtggtgtacgtcgatgatgatgttcagttacgccgccttatggcacgtaacgggtttactgaagaagaagctctgaagcgcattcgttcacagtggcccagtgcggagaaagttgctcgtgcagacgctgtcatcgacaataatggcaatattgaagaaacccgccgccagctgctggacattttacaccagtgggatctgctggacaagggtggctccggccaccatcatcaccatcac

SEQ ID NO: 1424 - protein, 211 aa, synthetic construct
  REGION 1..211: note = Variant of 3'O-kinase
MAVTIGLTGGIAAGKSTVSAMMRELGLPVIDADEAARAVMKPGDEAYRDIVAEFGPGLLLEDGEIDRQKLGAIRFSDEQQRKVLNSIVGPAVLKKMLAEWEAHIGSGAKTVVLDIPLLFESGLQSCVDKVLVVYVDDDVQLRRLMARNGFTEEEALKRIRSQWPSAEKVARADAVIDNNGNIEETRRQLLDILHQWDLLDKGGSGHHHHHH

SEQ ID NO: 1425 - DNA, 633 bp, synthetic construct
  misc_feature 1..633: note = Variant of 3'O-kinase
  source 1..633: mol_type = other DNA
atggcggttaccattggtttaacaggagggatcgcagcgggcaaatcgagtgtgagtgccatgatgcgtgaactgggtctgccggtcatcgatgctgacgaggcagcacgcgccgttatgaagccaggcgaagaagcgtatcgcgacattgtagctgaattcggtccgggcatcctgcgtgcggatagtgagatcgatcgccagaaactgggtgctatccgcttttcggacgaacaacaacgtaaggtgctgaattcgattgtaggtcctgcagtcctgaagaagatgctcgctgagtgggaagctcattttgggtcaggcgccaagacggttgtgctggatatcccgctgctgttcgaatccggattgcaacgttgggtcgacaaagttctcgtggtgtacgtcgatgatgatgttcagttacgccgccttatggcacgtaacgggtttactgaagaagaagctctgaagcgcattcgttcacagtggcccagtgcggagaaagttaaacgtgcagacgctgtcatcgacaataatggcaatattgaagaaacccgccgccagctgctggacattttacaccagtgggatctgctggacaagggtggctccggccaccatcatcaccatcac

SEQ ID NO: 1426 - protein, 211 aa, synthetic construct
  REGION 1..211: note = Variant of 3'O-kinase
MAVTIGLTGGIAAGKSSVSAMMRELGLPVIDADEAARAVMKPGEEAYRDIVAEFGPGILRADSEIDRQKLGAIRFSDEQQRKVLNSIVGPAVLKKMLAEWEAHFGSGAKTVVLDIPLLFESGLQRWVDKVLVVYVDDDVQLRRLMARNGFTEEEALKRIRSQWPSAEKVKRADAVIDNNGNIEETRRQLLDILHQWDLLDKGGSGHHHHHH

SEQ ID NO: 1427 - DNA, 633 bp, synthetic construct
  misc_feature 1..633: note = Variant of 3'O-kinase
  source 1..633: mol_type = other DNA
atggcggttaccattggtttaacaggagggatcgcagcgggcaaatcgagtgtgagtgccatgatgcgtgaactgggtctgccggtcatcgatgctgacgaggcagcacgcgccgttatgaagccaggcgaagaagcgtatcgcgacattgtagctgaattcggtccgggcatcctgcgtgcggatgaggagatcgatcgccagaaactgggtgctatccgcttttcggacgaacaacaacgtaaggtgctgaattcgattgtaggtcctgcagtcctgaagaagatgctcgctgagtgggaagctcatatcgggtcaggcgccaagacggttgtgctggatatcccgctgctgttcgaatccggattgcaaagttgggtcgacaaagttctcgtggtgtacgtcgatgatgatgttcagttacgccgccttatggcacgtaacgggtttactgaagaagaagctctgaagcgcattcgttcacagtggcccagtgcggagaaagttaaacgtgcagacgctgtcatcgacaataatggcaatattgaagaaacccgccgccagctgctggacattttacaccagtgggatctgctggacaagggtggctccggccaccatcatcaccatcac

SEQ ID NO: 1428 - protein, 211 aa, synthetic construct
  REGION 1..211: note = Variant of 3'O-kinase
MAVTIGLTGGIAAGKSSVSAMMRELGLPVIDADEAARAVMKPGEEAYRDIVAEFGPGILRADEEIDRQKLGAIRFSDEQQRKVLNSIVGPAVLKKMLAEWEAHIGSGAKTVVLDIPLLFESGLQSWVDKVLVVYVDDDVQLRRLMARNGFTEEEALKRIRSQWPSAEKVKRADAVIDNNGNIEETRRQLLDILHQWDLLDKGGSGHHHHHH

SEQ ID NO: 1429 - DNA, 633 bp, synthetic construct
  misc_feature 1..633: note = Variant of 3'O-kinase
  source 1..633: mol_type = other DNA
atggcggtgaccattggtctgacaggagggatcgcagcgggcaaatcgactgtgagtgccatgatgcgtgaactgggtctggttgtcatcgatgctgacgaggcagcacgcgccgttatgaagccaggcgaagaagcgtatcgcgacattgtggctgaattcggtccgggcatccttcgtgcggatggcgagatcgatcgccagaaactgggtgctatccgcttttcggacgaacaacaacgtaaggtgctgaattcgattgtaggtcctgcagtcctgaagaagatgctcgctgagtgggaagctcatatcgggtcaggcgccaagacggttgtgctggatatcccgctgctgttcgaatccggattgcaatcgtgggtcgacaaagttctcgtggtgtacgtcgatgatgatgttcagttacgccgccttatggcacgtaacgggtttactgaagaagaagctctgaagcgcattcgttcacagtggcccagtgcggagaaagttaaacgtgcagacgctgtcatcgacaataatggcaatattgaagaaacccgccgccagctgctggacattttacaccagtgggatctgctggacaagggtggctccggccaccatcatcaccatcac

SEQ ID NO: 1430 - protein, 211 aa, synthetic construct
  REGION 1..211: note = Variant of 3'O-kinase
MAVTIGLTGGIAAGKSTVSAMMRELGLVVIDADEAARAVMKPGEEAYRDIVAEFGPGILRADGEIDRQKLGAIRFSDEQQRKVLNSIVGPAVLKKMLAEWEAHIGSGAKTVVLDIPLLFESGLQSWVDKVLVVYVDDDVQLRRLMARNGFTEEEALKRIRSQWPSAEKVKRADAVIDNNGNIEETRRQLLDILHQWDLLDKGGSGHHHHHH

SEQ ID NO: 1431 - DNA, 633 bp, synthetic construct
  misc_feature 1..633: note = Variant of 3'O-kinase
  source 1..633: mol_type = other DNA
atggcggttaccattggtttaacaggagggatcgcagcgggcaaatcgactgtgagtgccatgatgcgtgaactgggtctgccggtcatcgatgctgacgaggcagcacgcgccgttatgaagccaggcgaagaagcgtatcgcgacattgtagctgaattcggtccgggcatcagtcgtgcggatggcgagatcgatcgccagaaactgggtgctatccgcttttcggacgaacaacaacgtaaggtgctgaattcgattgtaggtcctgcagtcctgaagaagatgctcgctgagtgggaagctcattttgggtcaggcgccaagacggttgtgctggatatcccgctgctgttcgaatccggattgcaacgttgggtcgacaaagttctcgtggtgtacgtcgatgatgatgttcagttacgccgccttatggcacgtaacgggtttactgaagaagaagctctgaagcgcattcgttcacagtggcccagtgcggagaaagttaaacgtgcagacgctgtcatcgacaataatggcaatattgaagaaacccgccgccagctgctggacattttacaccagtgggatctgctggacaagggtggctccggccaccatcatcaccatcac

SEQ ID NO: 1432 - protein, 211 aa, synthetic construct
  REGION 1..211: note = Variant of 3'O-kinase
MAVTIGLTGGIAAGKSTVSAMMRELGLPVIDADEAARAVMKPGEEAYRDIVAEFGPGISRADGEIDRQKLGAIRFSDEQQRKVLNSIVGPAVLKKMLAEWEAHFGSGAKTVVLDIPLLFESGLQRWVDKVLVVYVDDDVQLRRLMARNGFTEEEALKRIRSQWPSAEKVKRADAVIDNNGNIEETRRQLLDILHQWDLLDKGGSGHHHHHH

SEQ ID NO: 1433 - DNA, 633 bp, synthetic construct
  misc_feature 1..633: note = Variant of 3'O-kinase
  source 1..633: mol_type = other DNA
atggcggttaccattggtttaacaggagggatcgcagctggcaagtcgactgtgagcgccatggctcgtgaactgggtctgccggtcatcgatgctgacgaggcagcacgcgccgttatgaagccaggcgaagaagcgtatcgcgacattgtagctgaattctacccgggcatccttcgtgcggatggcgagatcgatcgccagaaactgggtgctatccgcttttcggacgaacaacaacgtaaggtgctgaattcgattgtaggtcctgcagtcctgaagaagatgctcattgagtgggaagctcatatcgggtcaggcgccaagacggttgtgctggatatcccgctgctgttcgaatccggattgcaatcgtggatggacaaagttctcgtggtgtacgtcgatgatgatgttcagttacgccgccttatggcacgtaacgggtttactgaagaagaagctctgaagcgcattcgttcacagtggcccagtgcggagaaagttaaacgtgcagacgctgtcatcgacaataatggcaatattgaagaaacccgccgccagctgctggacattttacaccagtgggatctgctggacaagggtggctccggccaccatcatcaccatcac

SEQ ID NO: 1434 - protein, 211 aa, synthetic construct
  REGION 1..211: note = Variant of 3'O-kinase
MAVTIGLTGGIAAGKSTVSAMARELGLPVIDADEAARAVMKPGEEAYRDIVAEFYPGILRADGEIDRQKLGAIRFSDEQQRKVLNSIVGPAVLKKMLIEWEAHIGSGAKTVVLDIPLLFESGLQSWMDKVLVVYVDDDVQLRRLMARNGFTEEEALKRIRSQWPSAEKVKRADAVIDNNGNIEETRRQLLDILHQWDLLDKGGSGHHHHHH

SEQ ID NO: 1435 - DNA, 633 bp, synthetic construct
  misc_feature 1..633: note = Variant of 3'O-kinase
  source 1..633: mol_type = other DNA
atggcggttaccattggtttaacaggagggatcgcagcgggcaaatcgagtgtgagtgccatgatgcgtgaactgggtctgccggtcatcgatgctgacgaggcagcacgcgccgttatgaagccaggcgaagaagcgtatcgcgacattgtagctgaattcggtccgggcatcctgcgtgcggatagtgagatcgatcgccagaaactgggtgctatccgcttttcggacgaacaacaacgtaaggtgctgaattcgattgtaggtcctgcagtcctgaagaagatgctcgctgagtgggaagctcataatgggtcaggcgccaagacggttgtgctggatatcccgctgctgttcgaatccggattgcaatcgtgggtcgacaaagttctcgtggtgtacgtcgatgatgatgttcagttacgccgccttatggcacgtaacgggtttactgaagaagaagctctgaagcgcattcgttcacagtggcccagtgcggagaaagttaaacgtgcagacgctgtcatcgacaataatggcaatattgaagaaacccgccgccagctgctggacattttacaccagtgggatctgctggacaagggtggctccggccaccatcatcaccatcac

SEQ ID NO: 1436 - protein, 211 aa, synthetic construct
  REGION 1..211: note = Variant of 3'O-kinase
MAVTIGLTGGIAAGKSSVSAMMRELGLPVIDADEAARAVMKPGEEAYRDIVAEFGPGILRADSEIDRQKLGAIRFSDEQQRKVLNSIVGPAVLKKMLAEWEAHNGSGAKTVVLDIPLLFESGLQSWVDKVLVVYVDDDVQLRRLMARNGFTEEEALKRIRSQWPSAEKVKRADAVIDNNGNIEETRRQLLDILHQWDLLDKGGSGHHHHHH

SEQ ID NO: 1437 - DNA, 633 bp, synthetic construct
  misc_feature 1..633: note = Variant of 3'O-kinase
  source 1..633: mol_type = other DNA
atggcggttaccattggtttaacaggagggatcgcagcgggcaaatcgactgtgagtgccatgatgcgtgaagcgggtctgccggtcatcgatgctgacgaggcacgccgcgccgttatgaagccaggcgaagaagcgtatcgcgacattgtagctgaattcggtccgggcatccttcgtgcggatggcgagatcgatcgccagaaactgggtgctatccgcttttcggacgaacaacaacgtaaggtgctgaattcgattgtaggtcctgcagtcctgaagaagatgctcgctgagtgggaagctcatatcgggtcaggcgccaagacggttgtgctggatatcccgctgctgttcgaatccggattgcaatcggtggtcgacaaagttctcgtggtgtacgtcgatgatgatgttcagttacgccgccttatggcacgtaacgggtttactgaagaagaagctctgaagcgcattcgttcacagtggcccagtgcggagaaagttaaacgtgcagacgctgtcatcgacaataatggcaatattgaagaaacccgccgccagctgctggacattttacaccagtgggatctgctggacaagggtggctccggccaccatcatcaccatcac

SEQ ID NO: 1438 - protein, 211 aa, synthetic construct
  REGION 1..211: note = Variant of 3'O-kinase
MAVTIGLTGGIAAGKSTVSAMMREAGLPVIDADEARRAVMKPGEEAYRDIVAEFGPGILRADGEIDRQKLGAIRFSDEQQRKVLNSIVGPAVLKKMLAEWEAHIGSGAKTVVLDIPLLFESGLQSVVDKVLVVYVDDDVQLRRLMARNGFTEEEALKRIRSQWPSAEKVKRADAVIDNNGNIEETRRQLLDILHQWDLLDKGGSGHHHHHH

SEQ ID NO: 1439 - DNA, 633 bp, synthetic construct
  misc_feature 1..633: note = Variant of 3'O-kinase
  source 1..633: mol_type = other DNA
atggcggttaccattggtttaacaggagggatcgcagctggcaagtcgactgtgagcgccatgatgcgtgaactgggtctgccggtcatcgatgctgacgaggcagcacgcgccgttatgaagccaggcgaagaagcgtatcgcgacattgtagctgaattcggtccgggcatccttcgtgcggatggcgagatcgatcgccagaaactgggtgctatccgcttttcggacgaacaacaacgtaaggtgctgaattcgattgtaggtcctgcagtcctgaagaagatgctcattgagtgggaagctcatatcgggtcaggcgccaagacggttgtgctggatatcccgctgctgttcgaatccggattgcaatcgtgggtcgacaaagttctcgtggtgtacgtcgatgatgatgttcagttacgccgccttatggcacgtaacgggtttactgaagaagaagctctgaagcgcattcgttcacagtggcccagtgcggataaagttaaaatggcagacgctgtcatcgacaataatggcaatattgaagaaacccgccgccagctgctggacattttacaccagtgggatctgctggacaaaggtggctccggccaccatcatcaccatcac

SEQ ID NO: 1440 - protein, 211 aa, synthetic construct
  REGION 1..211: note = Variant of 3'O-kinase
MAVTIGLTGGIAAGKSTVSAMMRELGLPVIDADEAARAVMKPGEEAYRDIVAEFGPGILRADGEIDRQKLGAIRFSDEQQRKVLNSIVGPAVLKKMLIEWEAHIGSGAKTVVLDIPLLFESGLQSWVDKVLVVYVDDDVQLRRLMARNGFTEEEALKRIRSQWPSADKVKMADAVIDNNGNIEETRRQLLDILHQWDLLDKGGSGHHHHHH

SEQ ID NO: 1441 - DNA, 633 bp, synthetic construct
  misc_feature 1..633: note = Variant of 3'O-kinase
  source 1..633: mol_type = other DNA
atggcggttaccattggtttaacaggagggatcgcagcgggcaaatcgactgtgagtgccatgatgcgtgaactgggtctgccggtcatcgatgctgacgaggcagcacgcgccgttatgaagccaggcgaagaagcgtatcgcgacattgtagctgaattcggtccgggcatcctgcgtgcggatggggagatcgatcgccagaaactgggtgctatccgcttttcggacgaaaaccaacgtaaggtgctgaattcgattgtaggtcctgcagtcctgaagaagatgctcgctgagtgggaagctcatattgggtcaggcgccaagacggttgtgctggatatcccgctgctgttcgaatccggattgcaacgttgggtcgactcggttctcgtggtgtacgtcgatgatgatgttcagttacgccgccttatggcacgtaacgggtttactgaagaagaagctctgaagcgcattcgttcacagtggcccagtgcggagaaagttaaacgtgcagacgctgtcatcgacaataatggcaatattgaagaaacccgccgccagctgctggacattttacaccagtgggatctgctggacaagggtggctccggccaccatcatcaccatcac

SEQ ID NO: 1442 - protein, 211 aa, synthetic construct
  REGION 1..211: note = Variant of 3'O-kinase
MAVTIGLTGGIAAGKSTVSAMMRELGLPVIDADEAARAVMKPGEEAYRDIVAEFGPGILRADGEIDRQKLGAIRFSDENQRKVLNSIVGPAVLKKMLAEWEAHIGSGAKTVVLDIPLLFESGLQRWVDSVLVVYVDDDVQLRRLMARNGFTEEEALKRIRSQWPSAEKVKRADAVIDNNGNIEETRRQLLDILHQWDLLDKGGSGHHHHHH

SEQ ID NO: 1443 - DNA, 633 bp, synthetic construct
  misc_feature 1..633: note = Variant of 3'O-kinase
  source 1..633: mol_type = other DNA
atggcggtcaccattggtttaacaggagggatcgcagcgggcaaatcgactgtgagtgccatgatgcgtgaactgggtctgccggtcatcgatgctgacgaggcagcacgcgccgttatgaagccaggctgtgaagcgtatcgcgacattgtagctgaattcggtccgggcattcttctggaagatggcgagatcgatcgccagaaactgggtgctatccgcttttcggacgaacaacaacgtaaggtgctgaattcgattgtaggtcctgcagtcctgaagaagatgctcgctgagtgggaagctcatatcgggtcaggcgccaagacggttgtgctggatatcccgctgctgttcgaatccggattgcaatcgatggtcgacaaagttctcgtggtgtacgtcgatgatgatgttcagttacgccgccttatggcacgtaacgggtttactgaagaagaagctctgaagcgcattcgttcacagtggcccagtgcggagaaagttaaacgtgcagacgctgtcatcgacaataatggcaatattgaagaaacccgccgccagctgctggacattttacaccagtgggatctgctggacaagggtggctccggccaccatcatcaccatcac

SEQ ID NO: 1444 - protein, 211 aa, synthetic construct
  REGION 1..211: note = Variant of 3'O-kinase
MAVTIGLTGGIAAGKSTVSAMMRELGLPVIDADEAARAVMKPGCEAYRDIVAEFGPGILLEDGEIDRQKLGAIRFSDEQQRKVLNSIVGPAVLKKMLAEWEAHIGSGAKTVVLDIPLLFESGLQSMVDKVLVVYVDDDVQLRRLMARNGFTEEEALKRIRSQWPSAEKVKRADAVIDNNGNIEETRRQLLDILHQWDLLDKGGSGHHHHHH

SEQ ID NO: 1445 - DNA, 633 bp, synthetic construct
  misc_feature 1..633: note = Variant of 3'O-kinase
  source 1..633: mol_type = other DNA
atggcggttaccattggtttaacaggagggatcgcagctggcaagtcgactgtgagcgccatggctcgtgaactgggtctgccggtcatcgatgctgacgaggcagcacgcgccgttatgaagccaggcgaagaagcgtatcgcgacattgtagctgaattctacccgggcatccttcgtgcggatggcgagatcgatcgccagaaactgggtgctatccgcttttcggacgaacaacaacgtaaggtgctgaattcgattgtaggtcctgcagtcctgaagaagatgctcctggagtgggaagctcatatcgggtcaggcgccaagacggttgtgctggatatcccgctgctgttcgaatccggattgcaatcgtgggtcgacaaagttctcgtggtgtacgtcgatgatgatgttcagttacgccgccttatggcacgtaacgggtttactgaagaagaagctctgaagcgcattcgttcacagtggcccagtgcggataaagttaaagtggcagccgctgtcatcgacaataatggcaatattgaagaaacccgccgccagctgctggacattttacaccagtgggttctgctggacaaaggtggctccggccaccatcatcaccatcac

SEQ ID NO: 1446 - protein, 211 aa, synthetic construct
  REGION 1..211: note = Variant of 3'O-kinase
MAVTIGLTGGIAAGKSTVSAMARELGLPVIDADEAARAVMKPGEEAYRDIVAEFYPGILRADGEIDRQKLGAIRFSDEQQRKVLNSIVGPAVLKKMLLEWEAHIGSGAKTVVLDIPLLFESGLQSWVDKVLVVYVDDDVQLRRLMARNGFTEEEALKRIRSQWPSADKVKVAAAVIDNNGNIEETRRQLLDILHQWVLLDKGGSGHHHHHH

SEQ ID NO: 1447 - DNA, 633 bp, synthetic construct
  misc_feature 1..633: note = Variant of 3'O-kinase
  source 1..633: mol_type = other DNA
atggcggttaccattggtttaacaggagggatcgcagcgggcaaatcgactgtgagtgccatgatgcgtgaactgggtctgccggtcatcgatgctgacgaggcagcacgcgccgttatgaagccaggcgaagaagcgtatcgcgacattgtagctgaattcggtccgggcatcctgcgtgcggatagtgagatcgatcgccagaaactgggtgctatccgcttttcggacgaacaacaacgtaaggtgctgaattcgattgtaggtcctgcagtcctgaagaagatgctcgctgagtgggaagctcatatcgggtcaggcgccaagacggttgtgctggatatcccgctgctgttcgaatccggattgcaatattgggtcgacaaagttctcgtggtgtacgtcgatgatgatgttcagttacgccgccttatggcacgtaacgggtttactgaagaagaagctctgaagcgcattcgttcacagtggcccagtgcggagaaagttaaacgtgcagacgctgtcatcgacaataatggcaatattgaagaaacccgccgccagctgctggacattttacaccagtgggatctgctggacaagggtggctccggccaccatcatcaccatcac

SEQ ID NO: 1448 - protein, 211 aa, synthetic construct
  REGION 1..211: note = Variant of 3'O-kinase
MAVTIGLTGGIAAGKSTVSAMMRELGLPVIDADEAARAVMKPGEEAYRDIVAEFGPGILRADSEIDRQKLGAIRFSDEQQRKVLNSIVGPAVLKKMLAEWEAHIGSGAKTVVLDIPLLFESGLQYWVDKVLVVYVDDDVQLRRLMARNGFTEEEALKRIRSQWPSAEKVKRADAVIDNNGNIEETRRQLLDILHQWDLLDKGGSGHHHHHH

SEQ ID NO: 1449 - DNA, 633 bp, synthetic construct
  misc_feature 1..633: note = Variant of 3'O-kinase
  source 1..633: mol_type = other DNA
atggcggttaccattggtttaacaggagggatcgcagcgggcaaatcgactgtgagtgccatgatgcgtgaagcgggtctgccggcgatcgatgctgacgaggcagcacgcgccgttatgaagccaggcgaagaagcgtatcgcgacattgtagctgaattcggtccgggcattctttgtgcagatggcgagatcgatcgccagaaactgggtgctatccgcttttcggacgaacaacaacgtaaggtgctgaattcgattgtaggtcctgcagtcctgaagaagatgctcgctgagtgggaagctcatatcgggtcaggcgccaagacggttgtgctggatatcccgctgctgttcgaatccggattgcaatcgctggtcgacaaagttctcgtggtgtacgtcgatgatgatgttcagttacgccgccttatggcacgtaacgggtttactgaagaagaagctctgaagcgcattcgttcacagtggcccagtgcggagaaagttaaacgtgcagacgctgtcatcgacaataatggcaatattgaagaaacccgccgccagctgctggacattttacaccagtgggatctgctggacaagggtggctccggccaccatcatcaccatcac

SEQ ID NO: 1450 - protein, 211 aa, synthetic construct
  REGION 1..211: note = Variant of 3'O-kinase
MAVTIGLTGGIAAGKSTVSAMMREAGLPAIDADEAARAVMKPGEEAYRDIVAEFGPGILCADGEIDRQKLGAIRFSDEQQRKVLNSIVGPAVLKKMLAEWEAHIGSGAKTVVLDIPLLFESGLQSLVDKVLVVYVDDDVQLRRLMARNGFTEEEALKRIRSQWPSAEKVKRADAVIDNNGNIEETRRQLLDILHQWDLLDKGGSGHHHHHH

SEQ ID NO: 1451 - DNA, 633 bp, synthetic construct
  misc_feature 1..633: note = Variant of 3'O-kinase
  source 1..633: mol_type = other DNA
atggcggttaccattggtttaacaggagggatcgcagcgggcaaatcgactgtgagtgccatgatgcgtgaactgggtctgccggtcatcgatgctgacgaggcagcacgcgccgttatgaagccaggcgaagaagcgtatcgcgacattgtagctgaattcgggccgggcatccttcgtgcggatggcgagatcgatcgccagaaactggccgctatccgcttttcggacgaacaacaacgtaaggtgctgaattcgattgtaggtcctgcagtcctgaagaagatgctcgcggagtgggaagctcatatcgggtcaggcgccaagacggttgtgctggatatcccgctgctgttcgaatccggattgcaatcgtggatggacaaagttctcgtggtgtacgtcgatgatgatgttcagttacgccgccttatggcacgtaacgggtttactgaagaagaagctctgaagcgcattcgttcacagtggcccagtgcggagaaagttaaacgtgcagacgctgtcatcgacaataatggcaatattgaagatacccgccgccagctgctggacattttacaccagtgggatctgctggacaaaggtggctccggccaccatcatcaccatcac

SEQ ID NO: 1452 - protein, 211 aa, synthetic construct
  REGION 1..211: note = Variant of 3'O-kinase
MAVTIGLTGGIAAGKSTVSAMMRELGLPVIDADEAARAVMKPGEEAYRDIVAEFGPGILRADGEIDRQKLAAIRFSDEQQRKVLNSIVGPAVLKKMLAEWEAHIGSGAKTVVLDIPLLFESGLQSWMDKVLVVYVDDDVQLRRLMARNGFTEEEALKRIRSQWPSAEKVKRADAVIDNNGNIEDTRRQLLDILHQWDLLDKGGSGHHHHHH

SEQ ID NO: 1453 - DNA, 633 bp, synthetic construct
  misc_feature 1..633: note = Variant of 3'O-kinase
  source 1..633: mol_type = other DNA
atggcggttaccattggtttaacaggagggatcgcagcgggcaaatcgactgtgagtgccatgatgcgtgaactgggttttccggtcatcgatgctgacgaggcagcacgcgccgttatgaagccaggcgaagaagcgtatcgcgacattgtagctgaattcgggccgggcatccttcgtgcggatggcgagatcgatcgccagaaactgcaagctatccgcttttcggacgaacaacaacgtaaggtgctgaattcgattgtaggtcctgcagtcctgaagaagatgctcgcggagtgggaagctcatatcgggtcaggcgccaagacggttgtgctggatatcccgctgctgttcgaatccggattgcaatcgtggatggacaaagttctcgtggtgtacgtcgatgatgatgttcagttacgccgccttatggcacgtaacgggtttactgaagaagaagctctgaagcgcattcgttcacagtggcccagtgcggagaaagttaaacgtgcagacgctgtcatcgacaataatggcaatattgaagaaacccgccgccagctgctggacattttacaccagtgggatctgctggacaaaggtggctccggccaccatcatcaccatcac

SEQ ID NO: 1454 - protein, 211 aa, synthetic construct
  REGION 1..211: note = Variant of 3'O-kinase
MAVTIGLTGGIAAGKSTVSAMMRELGFPVIDADEAARAVMKPGEEAYRDIVAEFGPGILRADGEIDRQKLQAIRFSDEQQRKVLNSIVGPAVLKKMLAEWEAHIGSGAKTVVLDIPLLFESGLQSWMDKVLVVYVDDDVQLRRLMARNGFTEEEALKRIRSQWPSAEKVKRADAVIDNNGNIEETRRQLLDILHQWDLLDKGGSGHHHHHH

SEQ ID NO: 1455 - DNA, 633 bp, synthetic construct
  misc_feature 1..633: note = Variant of 3'O-kinase
  source 1..633: mol_type = other DNA
atggcggttaccattggtttaacaggagggatcgcagcgggcaaatcgactgtgagtgccatgatgcgtgaactgggttttccggtcatcgatgctgacgaggcagcacgcgccgttatgaagccaggcgaagaagcgtatcgcgacattgtagctgaattcgggccgggcatccttcgtgcggatggcgagatcgatcgcgggaaactggccgctatccgcttttcggacgaacaacaacgtaaggtgctgaattcgattgtaggtcctgcagtcctgaagaagatgctcgcggagtgggaagctcatatcgggtcaggcgccaagacggttgtgctggatatcccgctgctgttcgaatccggattgcaatcgtggatggacaaagttctcgtggtgtacgtcgatgatgatgttcagttacgccgccttatggcacgtaacgggtttactgaagaagaagctctgaagcgcattcgttcacagtggcccagtgcggagaaagttaaacgtgcagacgctgtcatcgacaataatggcaatattgaagatacccgccgccagctgctggacattttacaccagtgggatctgctggacaaaggtggctccggccaccatcatcaccatcac

SEQ ID NO: 1456 - protein, 211 aa, synthetic construct
  REGION 1..211: note = Variant of 3'O-kinase
MAVTIGLTGGIAAGKSTVSAMMRELGFPVIDADEAARAVMKPGEEAYRDIVAEFGPGILRADGEIDRGKLAAIRFSDEQQRKVLNSIVGPAVLKKMLAEWEAHIGSGAKTVVLDIPLLFESGLQSWMDKVLVVYVDDDVQLRRLMARNGFTEEEALKRIRSQWPSAEKVKRADAVIDNNGNIEDTRRQLLDILHQWDLLDKGGSGHHHHHH

SEQ ID NO: 1457 - DNA, 633 bp, synthetic construct
  misc_feature 1..633: note = Variant of 3'O-kinase
  source 1..633: mol_type = other DNA
atggcggttaccattggtttaacaggagggatcgcagcgggcaaatcgactgtgagtgccatgatgcgtgaactgggtctgccggtcatcgatgctgacgaggcagcacgcgccgttatgaagccaggcgaagaagcgtatcgcgacattgtagctgaattcgggccgggcatccttcgtgcggatggcgagatcgatcgccagaaactggccgctatccgcttttcggacgaacaacaacgtaaggtgctgaattcgattgtaggtcctgcagtcctgaagaagatgctcgcggagtgggaagctcatatcgggtcaggcgccaagacggttgtgctggatatcccgctgctgttcgaatccggattgcaatcgtggatggacaaagttctcgtggtgtacgtcgatgatgatgttcagttacgccgccttatggcacgtaacgggtttactgaagaagaagctctgaagcgcattcgttcacagtggcccagtgcggagaaagttaaacgtgcagacgctgtcatcgacaataatggcaatattgaagaaacccgccgccagctgctggacattttacaccagtgggatctgctggacaaaggtggctccggccaccatcatcaccatcac

SEQ ID NO: 1458 - protein, 211 aa, synthetic construct
  REGION 1..211: note = Variant of 3'O-kinase
MAVTIGLTGGIAAGKSTVSAMMRELGLPVIDADEAARAVMKPGEEAYRDIVAEFGPGILRADGEIDRQKLAAIRFSDEQQRKVLNSIVGPAVLKKMLAEWEAHIGSGAKTVVLDIPLLFESGLQSWMDKVLVVYVDDDVQLRRLMARNGFTEEEALKRIRSQWPSAEKVKRADAVIDNNGNIEETRRQLLDILHQWDLLDKGGSGHHHHHH

SEQ ID NO: 1459 - DNA, 633 bp, synthetic construct
  misc_feature 1..633: note = Variant of 3'O-kinase
  source 1..633: mol_type = other DNA
atggcggttaccattggtttaacaggagggatcgcagcgggcaaatcgactgtgagtgccatgatgcgtgaactgggttttccggtcatcgatgctgacgaggcagcacgcgccgttatgaagccaggcgaagaagcgtatcgcgacattgtagctgaattcgggccgggcatccttcgtgcggatggcgagatcgatcgccagaaactgactgctatccgcttttcggacgaacaacaacgtaaggtgctgaattcgattgtaggtcctgcagtcctgaagaagatgctcgcggagtgggaagctcatatcgggtcaggcgccaagacggttgtgctggatatcccgctgctgttcgaatccggattgcaatcgtggatggacaaagttctcgtggtgtacgtcgatgatgatgttcagttacgccgccttatggcacgtaacgggtttactgaagaagaagctctgaagcgcattcgttcacagtggcccagtgcggagaaagttaaacgtgcagacgctgtcatcgacaataatggcaatattgaagatacccgccgccagctgctggacattttacaccagtgggatctgctggacaaaggtggctccggccaccatcatcaccatcac

SEQ ID NO: 1460 - protein, 211 aa, synthetic construct
  REGION 1..211: note = Variant of 3'O-kinase
MAVTIGLTGGIAAGKSTVSAMMRELGFPVIDADEAARAVMKPGEEAYRDIVAEFGPGILRADGEIDRQKLTAIRFSDEQQRKVLNSIVGPAVLKKMLAEWEAHIGSGAKTVVLDIPLLFESGLQSWMDKVLVVYVDDDVQLRRLMARNGFTEEEALKRIRSQWPSAEKVKRADAVIDNNGNIEDTRRQLLDILHQWDLLDKGGSGHHHHHH

SEQ ID NO: 1461 - DNA, 633 bp, synthetic construct
  misc_feature 1..633: note = Variant of 3'O-kinase
  source 1..633: mol_type = other DNA
atggcggttaccattggtttaacaggagggatcgcagcgggcaaatcgactgtgagtgccatgatgcgtgaactgggtctgccggtcatcgatgctgacgaggcagcacgcgccgttatgaagccaggcgaagaagcgtatcgcgacattgtagctgaattcgggccgggcatccttcgtgcggatggcgagatcgatcgcgggaaactgcgtgctatccgcttttcggacgaacaacaacgtaaggtgctgaattcgattgtaggtcctgcagtcctgaagaagatgctcgcggagtgggaagctcatatcgggtcaggcgccaagacggttgtgatggatattccgctgctgttcgaatccggattgcaatcgtggatggacaaagttctcgtggtgtacgtcgatgatgatgttcagttacgccgccttatggcacgtaacgggtttactgaagaagaagctctgaagcgcattcgttcacagtggcccagtgcggagaaagttaaacgtgcagacgctgtcatcgacaataatggcaatattgaagaaacccgccgccagctgctggacattttacaccagtgggatctgctggacaaaggtggctccggccaccatcatcaccatcac

SEQ ID NO: 1462 - protein, 211 aa, synthetic construct
  REGION 1..211: note = Variant of 3'O-kinase
MAVTIGLTGGIAAGKSTVSAMMRELGLPVIDADEAARAVMKPGEEAYRDIVAEFGPGILRADGEIDRGKLRAIRFSDEQQRKVLNSIVGPAVLKKMLAEWEAHIGSGAKTVVMDIPLLFESGLQSWMDKVLVVYVDDDVQLRRLMARNGFTEEEALKRIRSQWPSAEKVKRADAVIDNNGNIEETRRQLLDILHQWDLLDKGGSGHHHHHH

SEQ ID NO: 1463 - DNA, 633 bp, synthetic construct
  misc_feature 1..633: note = Variant of 3'O-kinase
  source 1..633: mol_type = other DNA
atggcggttaccattggtttaacaggagggatcgcagcgggcaaatcgactgtgagtgccatgatgcgtgaactgggtctgccggtcatcgatgctgacgaggcagcacgcgccgttatgaagccaggcgaagaagcgtatcgcgacattgtagctgaattcgggccgggcatccttcgtgcggatggcgagatcgatcgcgggaaactgcgtgctatccgcttttcggacgaacaacaacgtaaggtgctgaattcgattgtaggtcctgcagtcctgaagaagatgctcgcggagtgggaagctcatatcgggtcaggcgccaagacggttgtgctggatatcccgctgctgttcgaatccggattgcaatcgtggatggacaaagttctcgtggtgtacgttgatgatgatgttcagttacgccgccttatggcacgtaacgggtttactgaagaagaagctctgatgcgcattcgttcacagtggcccagtgcggagaaagttaaacgtgcagacgctgtcatcgacaataatggcaatattgaagatacccgccgccagctgctggacattttacaccagtgggatctgctggacaaaggtggctccggccaccatcatcaccatcac

SEQ ID NO: 1464 - protein, 211 aa, synthetic construct
  REGION 1..211: note = Variant of 3'O-kinase
MAVTIGLTGGIAAGKSTVSAMMRELGLPVIDADEAARAVMKPGEEAYRDIVAEFGPGILRADGEIDRGKLRAIRFSDEQQRKVLNSIVGPAVLKKMLAEWEAHIGSGAKTVVLDIPLLFESGLQSWMDKVLVVYVDDDVQLRRLMARNGFTEEEALMRIRSQWPSAEKVKRADAVIDNNGNIEDTRRQLLDILHQWDLLDKGGSGHHHHHH

SEQ ID NO: 1465 - DNA, 633 bp, synthetic construct
  misc_feature 1..633: note = Variant of 3'O-kinase
  source 1..633: mol_type = other DNA
atggcggttaccattggtttaacaggagggatcgcagcgggcaaatcgactgtgagtgccatgatgcgtgaactgggttttccggtcatcgatgctgacgaggcagcacgcgccgttatgaagccaggcgaagaagcgtatcgcgacattgtagctgaattcgggccgggcatccttcgtgcggatggcgagatcgatcgccagaaactgggtgctatccgcttttcggacgaacaacaacgtaaggtgctgaattcgattgtaggtcctgcagtcctgaagaagatgctcgcggagtgggaagctcatatcgggtcaggcgccaagacggttgtgctggatatcccgctgctgttcgaatccggattgcaatcgtggatggacaaagttctcgtggtgtacgtcgatgatgatgttcagttacgccgccttatggcacgtaacgggtttactgaagaagaagctctgaagcgcattcgttcacagtggcccagtgcggagaaagttaaacgtgcagacgctgtcatcgacaataatggcaatattgaagaaacccgccgccagctgctggacattttacaccagtgggatctgctggacaaaggtggctccggccaccatcatcaccatcac

SEQ ID NO: 1466 - protein, 211 aa, synthetic construct
  REGION 1..211: note = Variant of 3'O-kinase
MAVTIGLTGGIAAGKSTVSAMMRELGFPVIDADEAARAVMKPGEEAYRDIVAEFGPGILRADGEIDRQKLGAIRFSDEQQRKVLNSIVGPAVLKKMLAEWEAHIGSGAKTVVLDIPLLFESGLQSWMDKVLVVYVDDDVQLRRLMARNGFTEEEALKRIRSQWPSAEKVKRADAVIDNNGNIEETRRQLLDILHQWDLLDKGGSGHHHHHH

SEQ ID NO: 1467 - DNA, 633 bp, synthetic construct
  misc_feature 1..633: note = Variant of 3'O-kinase
  source 1..633: mol_type = other DNA
atggcggttaccattggtttaacaggagggatcgcagcgggcaaatcgactgtgagtgccatgatgcgtgaactgggtctgccggtcatcgatgctgacgaggcagcacgcgccgttatgaagccaggcgaagaagcgtatcgcgacattgtagctgaattcgggccgggcatccttcgtgcggatggcgagatcgatcgcgggaaactgcaagctatccgcttttcggacgaacaacaacgtaaggtgctgaattcgattgtaggtcctgcagtcctgaagaagatgctcgcggagtgggaagctcatatcgggtcaggcgccaagacggttgtgatggatattccgctgctgttcgaatccggattgcaatcgtggatggacaaagttctcgtggtgtacgtcgatgatgatgttcagttacgccgccttatggcacgtaacgggtttactgaagaagaagctctgcgccgcattcgttcacagtggcccagtgcggagaaagttaaacgtgcagacgctgtcctggacaataatggcaatattgaagaaacccgccgccagctgctggacattttacaccagtgggatctgctggacaaaggtggctccggccaccatcatcaccatcac

SEQ ID NO: 1468 - protein, 211 aa, synthetic construct
  REGION 1..211: note = Variant of 3'O-kinase
MAVTIGLTGGIAAGKSTVSAMMRELGLPVIDADEAARAVMKPGEEAYRDIVAEFGPGILRADGEIDRGKLQAIRFSDEQQRKVLNSIVGPAVLKKMLAEWEAHIGSGAKTVVMDIPLLFESGLQSWMDKVLVVYVDDDVQLRRLMARNGFTEEEALRRIRSQWPSAEKVKRADAVLDNNGNIEETRRQLLDILHQWDLLDKGGSGHHHHHH

SEQ ID NO: 1469 - DNA, 633 bp, synthetic construct
  misc_feature 1..633: note = Variant of 3'O-kinase
  source 1..633: mol_type = other DNA
atggcggttaccattggtttaacaggagggatcgcagcgggcaaatcgactgtgagtgccatgatgcgtgaactgggtctgccggtcatcgatgctgacgaggcagcacgcgccgttatgaagccaggcgaagaagcgtatcgcgacattgtagctgaattcgggccgggcatccttcgtgcggatggcgagatcgatcgccagaaactgactgctatccgcttttcggacgaacaacaacgtaaggtgctgaattcgattgtaggtcctgcagtcctgaagaagatgctcgcggagtgggaagctcatatcgggtcaggcgccaagacggttgtgctggatattccgctgctgttcgaatccggattgcaatcgtggatggacaaagttctcgtggtgtacgtcgatgatgatgttcagttacgccgccttatggcacgtaacgggtttactgaagaagaagctctgaagcgcattcgttcacagtggcccagtgcggagaaagttaaacgtgcagacgctgtcatcgacaataatggcaatattgaagatacccgccgccagctgctggacattttacaccagtgggatctgctggacaaaggtggctccggccaccatcatcaccatcac

SEQ ID NO: 1470 - protein, 211 aa, synthetic construct
  REGION 1..211: note = Variant of 3'O-kinase
MAVTIGLTGGIAAGKSTVSAMMRELGLPVIDADEAARAVMKPGEEAYRDIVAEFGPGILRADGEIDRQKLTAIRFSDEQQRKVLNSIVGPAVLKKMLAEWEAHIGSGAKTVVLDIPLLFESGLQSWMDKVLVVYVDDDVQLRRLMARNGFTEEEALKRIRSQWPSAEKVKRADAVIDNNGNIEDTRRQLLDILHQWDLLDKGGSGHHHHHH

SEQ ID NO: 1471 - DNA, 633 bp, synthetic construct
  misc_feature 1..633: note = Variant of 3'O-kinase
  source 1..633: mol_type = other DNA
atggcggttaccattggtttaacaggagggatcgcagcgggcaaatcgactgtgagtgccatgatgcgtgaactgggtttcccggtcatcgatgctgacgaggcagcacgcgccgttatgaagccaggcgaagaagcgtatcgcgacattgtagctgaattcgggccgggcatccttcgtgcggatggcgagatcgatcgccagaaactgggtgctatccgcttttcggacgaacaacaacgtaaggtgctgaattcgattgtaggtcctgcagtcctgaagtatatgctcgcggagtgggaagctcatatcgggtcaggcgccaagacggttgtgctggatatcccgctgctgttcgaatccggattgcaatcgtggatggacaaagttctcgtggtgtacgtcgatgatgatgttcagttacgccgccttatggcccgtaacgggtttacggaagaagaagctctgaagcgcattcgttcacagtggcccagtgcggagaaagttaaacgtgcagacgctgtcatcgacaataatggcaatattgaagaaacccgccgccagctgctggacattttacaccagtgggatctgctggacaaaggtggctccggccaccatcatcaccatcac

SEQ ID NO: 1472 - protein, 211 aa, synthetic construct
  REGION 1..211: note = Variant of 3'O-kinase
MAVTIGLTGGIAAGKSTVSAMMRELGFPVIDADEAARAVMKPGEEAYRDIVAEFGPGILRADGEIDRQKLGAIRFSDEQQRKVLNSIVGPAVLKYMLAEWEAHIGSGAKTVVLDIPLLFESGLQSWMDKVLVVYVDDDVQLRRLMARNGFTEEEALKRIRSQWPSAEKVKRADAVIDNNGNIEETRRQLLDILHQWDLLDKGGSGHHHHHH

SEQ ID NO: 1473 - DNA, 633 bp, synthetic construct
  misc_feature 1..633: note = Variant of 3'O-kinase
  source 1..633: mol_type = other DNA
atggcggttaccattggtttaacaggagggattgcagcgggcaaatcgactgtgagtgccatgatgcgtgaactgggtttcccggtcatcgatgctgacgaggcagcacgcgccgttatgaagccaggcgaagaagcgtatcgcgacattgtagctgaattcgggccgggcatccttcgtgcggatggcgagatcgatcgccagaaactgggtgctatccgcttttcggacgaacaacaacgtaaggtgctgaattcgattgtaggtcctgcagtcctgaagcatatgctcgcggagtgggaagctcatatcgggtcaggcgccaagacggttgtgctggatatcccgctgctgttcgaatccggattgcaatcgtggatggacaaagtcctcgtggtgtacgtcgatgatgatgttcagttacgccgccttatggcacgtaacgggtttactgaagaagaagctctgaagcgcattcgttcacagtggcccagtgcggagaaagttaaacgtgcagacgctgtcatcgacaataatggcaatattgaagaaacccgccgccagctgctggacattttacaccagtgggatctgctggacaaaggtggctccggccaccatcatcaccatcac

SEQ ID NO: 1474 - protein, 211 aa, synthetic construct
  REGION 1..211: note = Variant of 3'O-kinase
MAVTIGLTGGIAAGKSTVSAMMRELGFPVIDADEAARAVMKPGEEAYRDIVAEFGPGILRADGEIDRQKLGAIRFSDEQQRKVLNSIVGPAVLKHMLAEWEAHIGSGAKTVVLDIPLLFESGLQSWMDKVLVVYVDDDVQLRRLMARNGFTEEEALKRIRSQWPSAEKVKRADAVIDNNGNIEETRRQLLDILHQWDLLDKGGSGHHHHHH

SEQ ID NO: 1475 - DNA, 633 bp, synthetic construct
  misc_feature 1..633: note = Variant of 3'O-kinase
  source 1..633: mol_type = other DNA
atggcggttaccattggtttaacaggagggatcgcagcgggcaaatcgactgtgagtgccatgatgcgtgaactgggtctgccggtcatcgatgctgacgaggcagcacgcgccgttatggcaccaggcgaagaagcgtatcgcgacattgtagctgaattcgggccgggcatccttcgtgcggatggcgagatcgatcgccagaaactgggtgacatccgcttttcggacgaacaacaacgtaaggtgctgaattcgattgtaggtcctgcagtcctgaagaagatgctcgcggagtgggaagctcatatcgggtcaggcgccaagacggttgtgctggatatcccgctgctgttcgaatccggattgcagtcgtggatggacaaagttctcgtggtgtacgtcgatgatgatgttcagttacgccgccttatggcacgtaacgggtttactgaagaagaagctctgaagcgcattagtgtccagtggcccagtgcggagaaagttaaacgtgcagacgctgtcatcgacaataatggcaatattgaagaaacccgccgccagctgctggacattttacaccagtgggatctgctggacaaaggtggctccggccaccatcatcaccatcac

SEQ ID NO: 1476 - protein, 211 aa, synthetic construct
  REGION 1..211: note = Variant of 3'O-kinase
MAVTIGLTGGIAAGKSTVSAMMRELGLPVIDADEAARAVMAPGEEAYRDIVAEFGPGILRADGEIDRQKLGDIRFSDEQQRKVLNSIVGPAVLKKMLAEWEAHIGSGAKTVVLDIPLLFESGLQSWMDKVLVVYVDDDVQLRRLMARNGFTEEEALKRISVQWPSAEKVKRADAVIDNNGNIEETRRQLLDILHQWDLLDKGGSGHHHHHH

SEQ ID NO: 1477 - DNA, 633 bp, synthetic construct
  misc_feature 1..633: note = Variant of 3'O-kinase
  source 1..633: mol_type = other DNA
atggcggttaccattggtttaacaggagggatcgcagcgggcaaatcgactgtgagtgccatgatgcgtgaactgggttttccggtcatcgatgctgacgaggcagcacgcgccgttatgaagccaggcgaagaagcgtatcgcgacattgtagctgaattcgggccgggcatccttcgtgcggatggcgagatcgatcgcgggaaactgggcgctatccgcttttcggacgaacaacaacgtaaggtgctgaattcgattgtaggtcctgcagtcctgaagaagatgctcgcggagtgggaagctcatatcgggtcaggcgccaagacggttgtgctggatatcccgctgctgttcgaatccggattgcaatcgtggatggacaaagttctcgtggtgtacgttgatgatgatgttcagttacgccgccttatggcacgtaacgggtttactgaagaagaagctctgaagcgcattcgttcacagtggcccagtgcggagaaagttaaacgtgcagacgctgtcatcgacaataatggcaatattgaagaaacccgccgccagctgctggacattttacaccagtgggatctgctggacaaaggtggctccggccaccatcatcaccatcac

SEQ ID NO: 1478 - protein, 211 aa, synthetic construct
  REGION 1..211: note = Variant of 3'O-kinase
MAVTIGLTGGIAAGKSTVSAMMRELGFPVIDADEAARAVMKPGEEAYRDIVAEFGPGILRADGEIDRGKLGAIRFSDEQQRKVLNSIVGPAVLKKMLAEWEAHIGSGAKTVVLDIPLLFESGLQSWMDKVLVVYVDDDVQLRRLMARNGFTEEEALKRIRSQWPSAEKVKRADAVIDNNGNIEETRRQLLDILHQWDLLDKGGSGHHHHHH

SEQ ID NO: 1479 - DNA, 633 bp, synthetic construct
  misc_feature 1..633: note = Variant of 3'O-kinase
  source 1..633: mol_type = other DNA
atggcggttaccattggtttaacaggagggatcgcagcgggcaaatcgactgtgagtgccatgatgcgtgaactgggtctgccggtcatcgatgctgacgaggcagcacgcgccgttatgaagccaggcgaagaagcgtatcgcgacattgtagctgaattcgggccgggcatccttcgtgcggatggcgagatcgatcgccagaaactgggtgctatccgcttttcggacgaacaacaacgtaaggtgctgaattcgattgtaggtcctgcagtcctgaagaagatgctcgcggagtgggaagctcatatcgggtcaggcgccaagacggttgtgctggatatcccgctgctgttcgaatccggattgcaagagtggatggacaaagttctcgtggtgtacgtcgatgatgatgttcagttacgccgccttatggcacgtaacgggtttactgaagaagaagctctgaagcgcattcgttcacagtggcccagtgcggagaaagttaaacgtgcagacgctgtcatcgacaataatggcaatattgaagaaacccgccgccagctgctggacattttacaccagtgggatctgctggacaaaggtggctccggccaccatcatcaccatcac

SEQ ID NO: 1480 - protein, 211 aa, synthetic construct
  REGION 1..211: note = Variant of 3'O-kinase
MAVTIGLTGGIAAGKSTVSAMMRELGLPVIDADEAARAVMKPGEEAYRDIVAEFGPGILRADGEIDRQKLGAIRFSDEQQRKVLNSIVGPAVLKKMLAEWEAHIGSGAKTVVLDIPLLFESGLQEWMDKVLVVYVDDDVQLRRLMARNGFTEEEALKRIRSQWPSAEKVKRADAVIDNNGNIEETRRQLLDILHQWDLLDKGGSGHHHHHH

SEQ ID NO: 1481 - DNA, 633 bp, synthetic construct
  misc_feature 1..633: note = Variant of 3'O-kinase
  source 1..633: mol_type = other DNA
atggcggttaccattggtttaacaggagggatcgcagcgggcaaatcgactgtgagtgccatgatgcgtgaactgggtctgccggtcatcgatgctgacgaggcagcacgcgccgttatgaagccaggcgaagaagcgtatcgcgacattgtagctgaattcgggccgggcatccttcgtggggatggcgagatcgatcgccagaaactgggtgctatccgcttttcggacgaacaacaacgtaaggtgctgaattcgattgtaggtcctgcagtcctgaagaagatgctcgcggagtgggaagctcatatcgggtcaggcgccaagacggttgtgctggatatcccgctgctgttcgaatccggattgcaatcgtggatggacaaagttctcgtggtgtacgtcgatgatgatgttcagttacgccgccttatggcacgtaacgggtttactgaagaagaagctctgaagcgcattcgttcacagtggcccagtgcggagaaagttaaacgtgcagacgctgtcatcgacaataatggcaatattgaagaaacccgccgccagctgctggacattttacaccagtgggatctgctggacaaaggtggctccggccaccatcatcaccatcac

SEQ ID NO: 1482 - protein, 211 aa, synthetic construct
  REGION 1..211: note = Variant of 3'O-kinase
MAVTIGLTGGIAAGKSTVSAMMRELGLPVIDADEAARAVMKPGEEAYRDIVAEFGPGILRGDGEIDRQKLGAIRFSDEQQRKVLNSIVGPAVLKKMLAEWEAHIGSGAKTVVLDIPLLFESGLQSWMDKVLVVYVDDDVQLRRLMARNGFTEEEALKRIRSQWPSAEKVKRADAVIDNNGNIEETRRQLLDILHQWDLLDKGGSGHHHHHH

SEQ ID NO: 1483 - DNA, 633 bp, synthetic construct
  misc_feature 1..633: note = Variant of 3'O-kinase
  source 1..633: mol_type = other DNA
atggcggttaccattggtttaacaggagggatcgcagcgggcaaatcgactgtgagtgccatgatgcgtgaactgggtctgccggtcatcgatgctgacgaggcagcacgcgccgttatgaagccaggcgaagaagcgtatcgcgacattgtagctgaattcgggccgggcatccttcgtgcggatggcgagatcgatcgccagaaactgggtgctatccgcttttcggacgaacaacaacgtaagcggctgaattcgattgtaggtcctgcagtcctgaagaagatgctcgcggagtgggaagctcatatcgggtcaggcgccaagacggttgtgctggatatcccgctgctgttcgaatccggattgcaatcgtggatggacaaagttctcgtggtgtacgtcgatgatgatgttcagttacgccgccttatggcacgtaacgggtttactgaagaagaagctctgaagcgcattcgttcacagtggcccagtgcggagaaagttaaacgtgcagacgctgtcatcgacaataatggcaatattgaagaaacccgccgccagctgctggacattttacaccagtgggatctgctggacaaaggtggctccggccaccatcatcaccatcac

SEQ ID NO: 1484 - protein, 211 aa, synthetic construct
  REGION 1..211: note = Variant of 3'O-kinase
MAVTIGLTGGIAAGKSTVSAMMRELGLPVIDADEAARAVMKPGEEAYRDIVAEFGPGILRADGEIDRQKLGAIRFSDEQQRKRLNSIVGPAVLKKMLAEWEAHIGSGAKTVVLDIPLLFESGLQSWMDKVLVVYVDDDVQLRRLMARNGFTEEEALKRIRSQWPSAEKVKRADAVIDNNGNIEETRRQLLDILHQWDLLDKGGSGHHHHHH

SEQ ID NO: 1485 - DNA, 633 bp, synthetic construct
  misc_feature 1..633: note = Variant of 3'O-kinase
  source 1..633: mol_type = other DNA
atggcggttaccattggtttaacaggagggatcgcagcgggcaaatcgactgtgagtgccatgatgcgtgaactgggtctgccggtcatcgatgctgacgaggcagcacgcgccgttatgaagccaggcgaagaagcgtatcgccagattgtagctgaattcgggccgggcatccttcgtgcggatggcgagatcgatcgccagaaactgggtgctatccgcttttcggacgaacaacaacgtaaggtgctgaattcgattgtaggtcctgcagtcctgaagaagatgctcgcggagtgggaagctcatatcgggtcaggcgccaagacggttgtgctggatatcccgctgctgttcgaatccggattgcaatcgtggatggacaaagttctcgtggtgtacgtcgatgatgatgttcagttacgccgccttatggcacgtaacgggtttactgaagaagaagctctgaagcgcattcgttcacagtggcccagtgcggagaaagttaaacgtgcagacgctgtcatcgacaataatggcaatattgaagaaacccgccgccagctgctggacattttacaccagtgggatctgctggacaaaggtggctccggccaccatcatcaccatcac

SEQ ID NO: 1486 - protein, 211 aa, synthetic construct
  REGION 1..211: note = Variant of 3'O-kinase
MAVTIGLTGGIAAGKSTVSAMMRELGLPVIDADEAARAVMKPGEEAYRQIVAEFGPGILRADGEIDRQKLGAIRFSDEQQRKVLNSIVGPAVLKKMLAEWEAHIGSGAKTVVLDIPLLFESGLQSWMDKVLVVYVDDDVQLRRLMARNGFTEEEALKRIRSQWPSAEKVKRADAVIDNNGNIEETRRQLLDILHQWDLLDKGGSGHHHHHH

SEQ ID NO: 1487 - DNA, 633 bp, synthetic construct
  misc_feature 1..633: note = Variant of 3'O-kinase
  source 1..633: mol_type = other DNA
atggcggttaccattggtttaacaggagggatcgcagcgggcaaatcgactgtgagtgccatgatgcgtgaactgggtctgccggtcatcgatgctgacgaggcagcacgcgccgttatgaagccaggcgaagaagcgtatcgcgacattgtatcggaattcgggccgggcatccttcgtgcggatggcgagatcgatcgccagaaactgggtgctatccgcttttcggacgaacaacaacgtaaggtgctgaattcgattgtaggtcctgcagtcctgaagaagatgctcgcggagtgggaagctcatatcgggtcaggcgccaagacggttgtgctggatatcccgctgctgttcgaatccggattgcaatcgtggatggacaaagttctcgtggtgtacgtcgatgatgatgttcagttacgccgccttatggcacgtaacgggtttactgaagaagaagctctgaagcgcattcgttcacagtggcccagtgcggagaaagttaaacgtgcagacgctgtcatcgacaataatggcaatattgaagaaacccgccgccagctgctggacattttacaccagtgggatctgctggacaaaggtggctccggccaccatcatcaccatcac

SEQ ID NO: 1488 - protein, 211 aa, synthetic construct
  REGION 1..211: note = Variant of 3'O-kinase
MAVTIGLTGGIAAGKSTVSAMMRELGLPVIDADEAARAVMKPGEEAYRDIVSEFGPGILRADGEIDRQKLGAIRFSDEQQRKVLNSIVGPAVLKKMLAEWEAHIGSGAKTVVLDIPLLFESGLQSWMDKVLVVYVDDDVQLRRLMARNGFTEEEALKRIRSQWPSAEKVKRADAVIDNNGNIEETRRQLLDILHQWDLLDKGGSGHHHHHH

SEQ ID NO: 1489 - DNA, 633 bp, synthetic construct
  misc_feature 1..633: note = Variant of 3'O-kinase
  source 1..633: mol_type = other DNA
atggcggttaccattggtttaacaggagggatcgcagcgggcaaatcgactgtgagtgccatgatgcgtgaactgggtctgccggtcatcgatgctgacgaggcagcacgcgccgttatgaagccaggcgaagaagcgtatcgcgacattgtagctgaattcgggccgggcatccttcgtgcggatggcgagatcgatcgccagaaactgggtgctatccgcttttcggacgaacaacaacgtaaggtgctgaattcgattgtaggtcctgcagtcctgaagaagatgctcgcggagtgggaagctcatatcgggtcaggcgccaagacggttgtgctggatatcccgctgctgttcgaatccggattgcaagcttggatggacaaagttctcgtggtgtacgtcgatgatgatgttcagttacgccgccttatggcacgtaacgggtttactgaagaagaagctctgaagcgcattcgttcacagtggcccagtgcggagaaagttaaacgtgcagacgctgtcatcgacaataatggcaatattgaagaaacccgccgccagctgctggacattttacaccagtgggatctgctggacaaaggtggctccggccaccatcatcaccatcac

SEQ ID NO: 1490 - protein, 211 aa, synthetic construct
  REGION 1..211: note = Variant of 3'O-kinase
MAVTIGLTGGIAAGKSTVSAMMRELGLPVIDADEAARAVMKPGEEAYRDIVAEFGPGILRADGEIDRQKLGAIRFSDEQQRKVLNSIVGPAVLKKMLAEWEAHIGSGAKTVVLDIPLLFESGLQAWMDKVLVVYVDDDVQLRRLMARNGFTEEEALKRIRSQWPSAEKVKRADAVIDNNGNIEETRRQLLDILHQWDLLDKGGSGHHHHHH

SEQ ID NO: 1491 - DNA, 633 bp, synthetic construct
  misc_feature 1..633: note = Variant of 3'O-kinase
  source 1..633: mol_type = other DNA
atggcggttaccattggtttaacaggagggatcgcagcgggcaaatcgactgtgagtgccatgatgcgtgaactgggtctgccggtcatcgatgctgacgaggcagcacgcgccgttatgaagccaggcgaagaagcgtatcgcatgattgtagctgaattcgggccgggcatccttcgtgcggatggcgagatcgatcgccagaaactgggtgctatccgcttttcggacgaacaacaacgtaaggtgctgaattcgattgtaggtcctgcagtcctgaagaagatgctcgcggagtgggaagctcatatcgggtcaggcgccaagacggttgtgctggatatcccgctgctgttcgaatccggattgcaatcgtggatggacaaagttctcgtggtgtacgtcgatgatgatgttcagttacgccgccttatggcacgtaacgggtttactgaagaagaagctctgaagcgcattcgttcacagtggcccagtgcggagaaagttaaacgtgcagacgctgtcatcgacaataatggcaatattgaagaaacccgccgccagctgctggacattttacaccagtgggatctgctggacaaaggtggctccggccaccatcatcaccatcac

SEQ ID NO: 1492 - protein, 211 aa, synthetic construct
  REGION 1..211: note = Variant of 3'O-kinase
MAVTIGLTGGIAAGKSTVSAMMRELGLPVIDADEAARAVMKPGEEAYRMIVAEFGPGILRADGEIDRQKLGAIRFSDEQQRKVLNSIVGPAVLKKMLAEWEAHIGSGAKTVVLDIPLLFESGLQSWMDKVLVVYVDDDVQLRRLMARNGFTEEEALKRIRSQWPSAEKVKRADAVIDNNGNIEETRRQLLDILHQWDLLDKGGSGHHHHHH

SEQ ID NO: 1493 - DNA, 633 bp, synthetic construct
  misc_feature 1..633: note = Variant of 3'O-kinase
  source 1..633: mol_type = other DNA
atggcggttaccattggtttaacaggagggatcgcagcgggcaaatcgactgtgagtgccatgatgcgtgaactgggtctgccggtcatcgatgctgacgaggcagcacgcgccgttatgaagccaggcgaagaagcgtatcgcgacattgtagctgaattcgggccgggcatccttcgtgcggatggcgagatcgatcgccagaaactgggtgctatccgcttttcggacgaacaacaacgtaaggtgctgaattcgattgtaggtcctgcagtcctgaagaagatgctcgcggagtgggaagctcatatcgggtcaggcgccaagacggttgtgctggatatcccgctgctgttcgaatccggattgcaatcgtggccggacaaagttctcgtggtgtacgtcgatgatgatgttcagttacgccgccttatggcacgtaacgggtttactgaagaagaagctctgaagcgcattcgttcacagtggcccagtgcggagaaagttaaacgtgcagacgctgtcatcgacaataatggcaatattgaagaaacccgccgccagctgctggacattttacaccagtgggatctgctggacaaaggtggctccggccaccatcatcaccatcac

SEQ ID NO: 1494 - protein, 211 aa, synthetic construct
  REGION 1..211: note = Variant of 3'O-kinase
MAVTIGLTGGIAAGKSTVSAMMRELGLPVIDADEAARAVMKPGEEAYRDIVAEFGPGILRADGEIDRQKLGAIRFSDEQQRKVLNSIVGPAVLKKMLAEWEAHIGSGAKTVVLDIPLLFESGLQSWPDKVLVVYVDDDVQLRRLMARNGFTEEEALKRIRSQWPSAEKVKRADAVIDNNGNIEETRRQLLDILHQWDLLDKGGSGHHHHHH

SEQ ID NO: 1495 - DNA, 633 bp, synthetic construct
  misc_feature 1..633: note = Variant of 3'O-kinase
  source 1..633: mol_type = other DNA
atggcggttaccattggtttaacaggagggatcgcagcgggcaaatcgactgtgagtgccatgatgcgtgaactgggtctgccggtcatcgatgctgacgaggcagcacgcgccgttatgaagccaggcgaagaagcgtatcgcgacattgtagctgaattcgggccgggcatccttcgtgcggatggcgagatcgatcgccagaaactgggtgctatccgcttttcggacgaacaacaacgtaaggtgctgaattcgattgtaggtcctgcagtcctgaagaagatgctcgcggagtgggaagctcatatcgggtcaggcgccaagacggttgtgctggatatcccgctgctgttcgaatccggattgcaatcgtggatggacaaagttctcgtggtgtacgtcgatgatgatgttcagttacgccgccttatggcacgtaacgggtttactgaagaagaagctctgaagcgcattcgttcacagtggcccagtgcggagaaagttaaacgtgcagacgctgtcatcgacaataatggcaatattgaagaaacccctcgccagctgctggacattttacaccagtgggatctgctggacaaaggtggctccggccaccatcatcaccatcac

SEQ ID NO: 1496 - protein, 211 aa, synthetic construct
  REGION 1..211: note = Variant of 3'O-kinase
MAVTIGLTGGIAAGKSTVSAMMRELGLPVIDADEAARAVMKPGEEAYRDIVAEFGPGILRADGEIDRQKLGAIRFSDEQQRKVLNSIVGPAVLKKMLAEWEAHIGSGAKTVVLDIPLLFESGLQSWMDKVLVVYVDDDVQLRRLMARNGFTEEEALKRIRSQWPSAEKVKRADAVIDNNGNIEETPRQLLDILHQWDLLDKGGSGHHHHHH

SEQ ID NO: 1497 - DNA, 633 bp, synthetic construct
  misc_feature 1..633: note = Variant of 3'O-kinase
  source 1..633: mol_type = other DNA
atggtggttaccattggtttaacaggagggatcgcagcgggcaaatcgactgtgagtgccatgatgcgtgaactgggtctgccggtcatcgatgctgacgaggcagcacgcgccgttatgaagccaggcgaagaagcgtatcgcgacattgtagctgaattcgggccgggcatccttcgtgcggatggcgagatcgatcgccagaaactgggtgctatccgcttttcggacgaacaacaacgtaaggtgctgaattcgattgtaggtcctgcagtcctgaagaagatgctcgcggagtgggaagctcatatcgggtcaggcgccaagacggttgtgctggatatcccgctgctgttcgaatccggattgcaatcgtggatggacaaagttctcgtggtgtacgtcgatgatgatgttcagttacgccgccttatggcacgtaacgggtttactgaagaagaagctctgaagcgcattcgttcacagtggcccagtgcggagaaagttaaacgtgcagacgctgtcatcgacaataatggcaatattgaagaaacccgccgccagctgctggacattttacaccagtgggatctgctggacaaaggtggctccggccaccatcatcaccatcac

SEQ ID NO: 1498 - protein, 211 aa, synthetic construct
  REGION 1..211: note = Variant of 3'O-kinase
MVVTIGLTGGIAAGKSTVSAMMRELGLPVIDADEAARAVMKPGEEAYRDIVAEFGPGILRADGEIDRQKLGAIRFSDEQQRKVLNSIVGPAVLKKMLAEWEAHIGSGAKTVVLDIPLLFESGLQSWMDKVLVVYVDDDVQLRRLMARNGFTEEEALKRIRSQWPSAEKVKRADAVIDNNGNIEETRRQLLDILHQWDLLDKGGSGHHHHHH

SEQ ID NO: 1499 - DNA, 633 bp, synthetic construct
  misc_feature 1..633: note = Variant of 3'O-kinase
  source 1..633: mol_type = other DNA
atggcggttaccattggtttaacaggagggatcgcagcgggcaaatcgactgtgagtgccatgatgcgtgaactgggtctgccggtcatcgatgctgacgaggcagcacgcgccgttatgaagccaggcgaagaagcgtatcgcgacattgtagctgaattcgggccgggcatccttcgtgcggatggcgagatcgatcgccagaaactgggtgctatccgcttttcggacgaacaacaacgtaaggtgctgaattcgattgtaggtcctgcagtcctgaagaagatgctcgcggagtggctggctcatatcgggtcaggcgccaagacggttgtgctggatatcccgctgctgttcgaatccggattgcaatcgtggatggacaaagttctcgtggtgtacgtcgatgatgatgttcagttacgccgccttatggcacgtaacgggtttactgaagaagaagctctgaagcgcattcgttcacagtggcccagtgcggagaaagttaaacgtgcagacgctgtcatcgacaataatggcaatattgaagaaacccgccgccagctgctggacattttacaccagtgggatctgctggacaaaggtggctccggccaccatcatcaccatcac

SEQ ID NO: 1500 - protein, 211 aa, synthetic construct
  REGION 1..211: note = Variant of 3'O-kinase
MAVTIGLTGGIAAGKSTVSAMMRELGLPVIDADEAARAVMKPGEEAYRDIVAEFGPGILRADGEIDRQKLGAIRFSDEQQRKVLNSIVGPAVLKKMLAEWLAHIGSGAKTVVLDIPLLFESGLQSWMDKVLVVYVDDDVQLRRLMARNGFTEEEALKRIRSQWPSAEKVKRADAVIDNNGNIEETRRQLLDILHQWDLLDKGGSGHHHHHH

SEQ ID NO: 1501 - DNA, 633 bp, synthetic construct
  misc_feature 1..633: note = Variant of 3'O-kinase
  source 1..633: mol_type = other DNA
atggcggttaccattggtttaacaggagggatcgcagcgggcaaatcgactgtgagtgccatgatgcgtgaactgggtctgccggtcatcgatgctgacgaggcagcacgcgccgttatgaagccaggcgaagaagcgtatcgcgacattgtagctgaattcgggccgggcatccttcgtgcggatggcgagatcgatcgccagaaactgggtgctatccgctttgatgacgaacaacaacgtaaggtgctgaattcgattgtaggtcctgcagtcctgaagaagatgctcgcggagtgggaagctcatatcgggtcaggcgccaagacggttgtgctggatatcccgctgctgttcgaatccggattgcaatcgtggatggacaaagttctcgtggtgtacgtcgatgatgatgttcagttacgccgccttatggcacgtaacgggtttactgaagaagaagctctgaagcgcattcgttcacagtggcccagtgcggagaaagttaaacgtgcagacgctgtcatcgacaataatggcaatattgaagaaacccgccgccagctgctggacattttacaccagtgggatctgctggacaaaggtggctccggccaccatcatcaccatcac

SEQ ID NO: 1502 - protein, 211 aa, synthetic construct
  REGION 1..211: note = Variant of 3'O-kinase
MAVTIGLTGGIAAGKSTVSAMMRELGLPVIDADEAARAVMKPGEEAYRDIVAEFGPGILRADGEIDRQKLGAIRFDDEQQRKVLNSIVGPAVLKKMLAEWEAHIGSGAKTVVLDIPLLFESGLQSWMDKVLVVYVDDDVQLRRLMARNGFTEEEALKRIRSQWPSAEKVKRADAVIDNNGNIEETRRQLLDILHQWDLLDKGGSGHHHHHH

SEQ ID NO: 1503 - DNA, 633 bp, synthetic construct
  misc_feature 1..633: note = Variant of 3'O-kinase
  source 1..633: mol_type = other DNA
atggcggttaccattggtttaacaggagggatcgcagcgggcaaatcgactgtgagtgccatgatgcgtgaactgggtctgccggtcatcgatgctgacgaggcagcacgcgccgttatgaagccaggcgaagaagcgtatcgcgacattgtagctgaattcgggccgggcatccttcgtgcggatggcgagatcgatcgccagaaactgggtgctatccgcttttcggacgaacaacaacgtgatgtgctgaattcgattgtaggtcctgcagtcctgaagaagatgctcgcggagtgggaagctcatatcgggtcaggcgccaagacggttgtgctggatatcccgctgctgttcgaatccggattgcaatcgtggatggacaaagttctcgtggtgtacgtcgatgatgatgttcagttacgccgccttatggcacgtaacgggtttactgaagaagaagctctgaagcgcattcgttcacagtggcccagtgcggagaaagttaaacgtgcagacgctgtcatcgacaataatggcaatattgaagaaacccgccgccagctgctggacattttacaccagtgggatctgctggacaaaggtggctccggccaccatcatcaccatcac

SEQ ID NO: 1504 - protein, 211 aa, synthetic construct
  REGION 1..211: note = Variant of 3'O-kinase
MAVTIGLTGGIAAGKSTVSAMMRELGLPVIDADEAARAVMKPGEEAYRDIVAEFGPGILRADGEIDRQKLGAIRFSDEQQRDVLNSIVGPAVLKKMLAEWEAHIGSGAKTVVLDIPLLFESGLQSWMDKVLVVYVDDDVQLRRLMARNGFTEEEALKRIRSQWPSAEKVKRADAVIDNNGNIEETRRQLLDILHQWDLLDKGGSGHHHHHH

SEQ ID NO: 1505 - DNA, 633 bp, synthetic construct
  misc_feature 1..633: note = Variant of 3'O-kinase
  source 1..633: mol_type = other DNA
atggcggttaccattggtttaacaggagggatcgcagcgggcaaatcgactgtgagtgccatgatgcgtgaactgggtctgccggtcatcgatgctgacgaggcagcacgcgccgttatgaagccaggcgaagaagcgtatcgcgacattgtagctgaattcgggccgggcatccttcgtgcggatggcgagatcgatcgccagaaactgggtgctatccgcttttcggacgaacaacaacgtaaggtgctgaattcgattgtaggtcctgcagtcctgcagaagatgctcgcggagtgggaagctcatatcgggtcaggcgccaagacggttgtgctggatatcccgctgctgttcgaatccggattgcaatcgtggatggacaaagttctcgtggtgtacgtcgatgatgatgttcagttacgccgccttatggcacgtaacgggtttactgaagaagaagctctgaagcgcattcgttcacagtggcccagtgcggagaaagttaaacgtgcagacgctgtcatcgacaataatggcaatattgaagaaacccgccgccagctgctggacattttacaccagtgggatctgctggacaaaggtggctccggccaccatcatcaccatcac

SEQ ID NO: 1506 - protein, 211 aa, synthetic construct
  REGION 1..211: note = Variant of 3'O-kinase
MAVTIGLTGGIAAGKSTVSAMMRELGLPVIDADEAARAVMKPGEEAYRDIVAEFGPGILRADGEIDRQKLGAIRFSDEQQRKVLNSIVGPAVLQKMLAEWEAHIGSGAKTVVLDIPLLFESGLQSWMDKVLVVYVDDDVQLRRLMARNGFTEEEALKRIRSQWPSAEKVKRADAVIDNNGNIEETRRQLLDILHQWDLLDKGGSGHHHHHH

SEQ ID NO: 1507 - DNA, 633 bp, synthetic construct
  misc_feature 1..633: note = Variant of 3'O-kinase
  source 1..633: mol_type = other DNA
atggcggttaccattggtttaacaggagggatcgcagcgggcaaatcgactgtgagtgccatgatgcgtgaactgggtctgccggtcatcgatgctgacgaggcagcacgcgccgttatgaagccaggcgaagaagcgtatcgcgacattgtagctgaattcgggccgggcatccttcgtgcggatggcgagatcgatcgccagaaactgggtgctatccgcttttcggacgaacaacaacgtaaggtgctgaattcgattgtaggtcctgcagtcctgaagaagatgctcgcggagtgggaagctcatatcgggtcaggcgccaagacggttgtgctggatatcccgctgctgttcgaatccggattgcaatcgtggatggacaaagttctcgtggtgtacgtcgatgatgatgttcagttacgccgccttatggcacgtaacgggtttactgaagaagaagctctgaagcgcattcgttcacagtggcccagtgcggagaaagttaaacgtgcagacgctgtcatcgacaataatggcaatattgaagaaaccgttcgccagctgctggacattttacaccagtgggatctgctggacaaaggtggctccggccaccatcatcaccatcac

SEQ ID NO: 1508 - protein, 211 aa, synthetic construct
  REGION 1..211: note = Variant of 3'O-kinase
MAVTIGLTGGIAAGKSTVSAMMRELGLPVIDADEAARAVMKPGEEAYRDIVAEFGPGILRADGEIDRQKLGAIRFSDEQQRKVLNSIVGPAVLKKMLAEWEAHIGSGAKTVVLDIPLLFESGLQSWMDKVLVVYVDDDVQLRRLMARNGFTEEEALKRIRSQWPSAEKVKRADAVIDNNGNIEETVRQLLDILHQWDLLDKGGSGHHHHHH

SEQ ID NO: 1509 - DNA, 633 bp, synthetic construct
  misc_feature 1..633: note = Variant of 3'O-kinase
  source 1..633: mol_type = other DNA
atggcggttaccattggtttaacaggagggatcgcagcgggcaaatcgactgtgagtgccatgatgcgtgaactgggtctgccggtcatcgatgctgacgaggcagcacgcgccgttatgaagccaggcgaagaagcgtatcgcgacattgtagctgaattcgggccgggcatccttcgtgcggatggcgagatcgatcgccagaaactgggtgctatccgcttttcggacgaacaacaacgtaaggtgctgaattcgattgtaggtcctgcagtcctgaataagatgctcgcggagtgggaagctcatatcgggtcaggcgccaagacggttgtgctggatatcccgctgctgttcgaatccggattgcaatcgtggatggacaaagttctcgtggtgtacgtcgatgatgatgttcagttacgccgccttatggcacgtaacgggtttactgaagaagaagctctgaagcgcattcgttcacagtggcccagtgcggagaaagttaaacgtgcagacgctgtcatcgacaataatggcaatattgaagaaacccgccgccagctgctggacattttacaccagtgggatctgctggacaaaggtggctccggccaccatcatcaccatcac

SEQ ID NO: 1510 - protein, 211 aa, synthetic construct
  REGION 1..211: note = Variant of 3'O-kinase
MAVTIGLTGGIAAGKSTVSAMMRELGLPVIDADEAARAVMKPGEEAYRDIVAEFGPGILRADGEIDRQKLGAIRFSDEQQRKVLNSIVGPAVLNKMLAEWEAHIGSGAKTVVLDIPLLFESGLQSWMDKVLVVYVDDDVQLRRLMARNGFTEEEALKRIRSQWPSAEKVKRADAVIDNNGNIEETRRQLLDILHQWDLLDKGGSGHHHHHH

SEQ ID NO: 1511 - DNA, 633 bp, synthetic construct
  misc_feature 1..633: note = Variant of 3'O-kinase
  source 1..633: mol_type = other DNA
atggcggttccgattggtttaacaggagggatcgcagcgggcaaatcgactgtgagtgccatgatgcgtgaactgggtctgccggtcatcgatgctgacgaggcagcacgcgccgttatgaagccaggcgaagaagcgtatcgcgacattgtagctgaattcgggccgggcatccttcgtgcggatggcgagatcgatcgccagaaactgggtgctatccgcttttcggacgaacaacaacgtaaggtgctgaattcgattgtaggtcctgcagtcctgaagaagatgctcgcggagtgggaagctcatatcgggtcaggcgccaagacggttgtgctggatatcccgctgctgttcgaatccggattgcaatcgtggatggacaaagttctcgtggtgtacgtcgatgatgatgttcagttacgccgccttatggcacgtaacgggtttactgaagaagaagctctgaagcgcattcgttcacagtggcccagtgcggagaaagttaaacgtgcagacgctgtcatcgacaataatggcaatattgaagaaacccgccgccagctgctggacattttacaccagtgggatctgctggacaaaggtggctccggccaccatcatcaccatcac

SEQ ID NO: 1512 - protein, 211 aa, synthetic construct
  REGION 1..211: note = Variant of 3'O-kinase
MAVPIGLTGGIAAGKSTVSAMMRELGLPVIDADEAARAVMKPGEEAYRDIVAEFGPGILRADGEIDRQKLGAIRFSDEQQRKVLNSIVGPAVLKKMLAEWEAHIGSGAKTVVLDIPLLFESGLQSWMDKVLVVYVDDDVQLRRLMARNGFTEEEALKRIRSQWPSAEKVKRADAVIDNNGNIEETRRQLLDILHQWDLLDKGGSGHHHHHH

SEQ ID NO: 1513 - DNA, 633 bp, synthetic construct
  misc_feature 1..633: note = Variant of 3'O-kinase
  source 1..633: mol_type = other DNA
atgtgggttaccattggtttaacaggagggatcgcagcgggcaaatcgactgtgagtgccatgatgcgtgaactgggtctgccggtcatcgatgctgacgaggcagcacgcgccgttatgaagccaggcgaagaagcgtatcgcgacattgtagctgaattcgggccgggcatccttcgtgcggatggcgagatcgatcgccagaaactgggtgctatccgcttttcggacgaacaacaacgtaaggtgctgaattcgattgtaggtcctgcagtcctgaagaagatgctcgcggagtgggaagctcatatcgggtcaggcgccaagacggttgtgctggatatcccgctgctgttcgaatccggattgcaatcgtggatggacaaagttctcgtggtgtacgtcgatgatgatgttcagttacgccgccttatggcacgtaacgggtttactgaagaagaagctctgaagcgcattcgttcacagtggcccagtgcggagaaagttaaacgtgcagacgctgtcatcgacaataatggcaatattgaagaaacccgccgccagctgctggacattttacaccagtgggatctgctggacaaaggtggctccggccaccatcatcaccatcac

SEQ ID NO: 1514 - protein, 211 aa, synthetic construct
  REGION 1..211: note = Variant of 3'O-kinase
MWVTIGLTGGIAAGKSTVSAMMRELGLPVIDADEAARAVMKPGEEAYRDIVAEFGPGILRADGEIDRQKLGAIRFSDEQQRKVLNSIVGPAVLKKMLAEWEAHIGSGAKTVVLDIPLLFESGLQSWMDKVLVVYVDDDVQLRRLMARNGFTEEEALKRIRSQWPSAEKVKRADAVIDNNGNIEETRRQLLDILHQWDLLDKGGSGHHHHHH

SEQ ID NO: 1515 - DNA, 633 bp, synthetic construct
  misc_feature 1..633: note = Variant of 3'O-kinase
  source 1..633: mol_type = other DNA
atggcggttaccattggtttaacaggagggatcgcagcgggcaaatcgactgtgagtgccatgatgcgtgaactgggtctgccggtcatcgatgctgacgagtatgcacgcgccgttatgaagccaggcgaagaagcgtatcgcgacattgtagctgaattcgggccgggcatccttcgtgcggatggcgagatcgatcgccagaaactgggtgctatccgcttttcggacgaacaacaacgtaaggtgctgaattcgattgtaggtcctgcagtcctgaagaagatgctcgcggagtgggaagctcatatcgggtcaggcgccaagacggttgtgctggatatcccgctgctgttcgaatccggattgcaatcgtggatggacaaagttctcgtggtgtacgtcgatgatgatgttcagttacgccgccttatggcacgtaacgggtttactgaagaagaagctctgaagcgcattcgttcacagtggcccagtgcggagaaagttaaacgtgcagacgctgtcatcgacaataatggcaatattgaagaaacccgccgccagctgctggacattttacaccagtgggatctgctggacaaaggtggctccggccaccatcatcaccatcac

SEQ ID NO: 1516 - protein, 211 aa, synthetic construct
  REGION 1..211: note = Variant of 3'O-kinase
MAVTIGLTGGIAAGKSTVSAMMRELGLPVIDADEYARAVMKPGEEAYRDIVAEFGPGILRADGEIDRQKLGAIRFSDEQQRKVLNSIVGPAVLKKMLAEWEAHIGSGAKTVVLDIPLLFESGLQSWMDKVLVVYVDDDVQLRRLMARNGFTEEEALKRIRSQWPSAEKVKRADAVIDNNGNIEETRRQLLDILHQWDLLDKGGSGHHHHHH

SEQ ID NO: 1517 - DNA, 633 bp, synthetic construct
  misc_feature 1..633: note = Variant of 3'O-kinase
  source 1..633: mol_type = other DNA
atggcggttaccattggtttaacaggagggatcgcagcgggcaaatcgactgtgagtgccatgatgcgtgaactgggtctgccggtcatcgatgctgacgaggcagcacgcgccgttatgaagccaggcgaagaagcgtatcgcgacattgtagctgaattcgggccgggcatccttcgtgcggatggcgagatcgatcgccagaaactgggtgctatccgcttttcggacgaacaacaacgtaaggtgctgaattcgattgtaggtcctgcagtcctggctaagatgctcgcggagtgggaagctcatatcgggtcaggcgccaagacggttgtgctggatatcccgctgctgttcgaatccggattgcaatcgtggatggacaaagttctcgtggtgtacgtcgatgatgatgttcagttacgccgccttatggcacgtaacgggtttactgaagaagaagctctgaagcgcattcgttcacagtggcccagtgcggagaaagttaaacgtgcagacgctgtcatcgacaataatggcaatattgaagaaacccgccgccagctgctggacattttacaccagtgggatctgctggacaaaggtggctccggccaccatcatcaccatcac

SEQ ID NO: 1518 - protein, 211 aa, synthetic construct
  REGION 1..211: note = Variant of 3'O-kinase
MAVTIGLTGGIAAGKSTVSAMMRELGLPVIDADEAARAVMKPGEEAYRDIVAEFGPGILRADGEIDRQKLGAIRFSDEQQRKVLNSIVGPAVLAKMLAEWEAHIGSGAKTVVLDIPLLFESGLQSWMDKVLVVYVDDDVQLRRLMARNGFTEEEALKRIRSQWPSAEKVKRADAVIDNNGNIEETRRQLLDILHQWDLLDKGGSGHHHHHH

SEQ ID NO: 1519 - DNA, 633 bp, synthetic construct
  misc_feature 1..633: note = Variant of 3'O-kinase
  source 1..633: mol_type = other DNA
atggcggttaccattggtttaacaggagggatcgcagcgggcaaatcgactgtgagtgccatgatgcgtgaactgggtctgccggtcatcgatgctgacgaggcagcacgcgccgttatgaagccaggcgaagaagcgtatcgcgacattgtagctgaattcgggccgggcatccttcgtgcggatggcgagatcgatcgccagaaactgggtgctatccgcttttcggacgaacaacaacgtaaggtgctgaattcgattgtaggtcctgcagtcctgactaagatgctcgcggagtgggaagctcatatcgggtcaggcgccaagacggttgtgctggatatcccgctgctgttcgaatccggattgcaatcgtggatggacaaagttctcgtggtgtacgtcgatgatgatgttcagttacgccgccttatggcacgtaacgggtttactgaagaagaagctctgaagcgcattcgttcacagtggcccagtgcggagaaagttaaacgtgcagacgctgtcatcgacaataatggcaatattgaagaaacccgccgccagctgctggacattttacaccagtgggatctgctggacaaaggtggctccggccaccatcatcaccatcac

SEQ ID NO: 1520 - protein, 211 aa, synthetic construct
  REGION 1..211: note = Variant of 3'O-kinase
MAVTIGLTGGIAAGKSTVSAMMRELGLPVIDADEAARAVMKPGEEAYRDIVAEFGPGILRADGEIDRQKLGAIRFSDEQQRKVLNSIVGPAVLTKMLAEWEAHIGSGAKTVVLDIPLLFESGLQSWMDKVLVVYVDDDVQLRRLMARNGFTEEEALKRIRSQWPSAEKVKRADAVIDNNGNIEETRRQLLDILHQWDLLDKGGSGHHHHHH

SEQ ID NO: 1521 - DNA, 633 bp, synthetic construct
  misc_feature 1..633: note = Variant of 3'O-kinase
  source 1..633: mol_type = other DNA
atgcgggttaccattggtttaacaggagggatcgcagcgggcaaatcgactgtgagtgccatgatgcgtgaactgggtctgccggtcatcgatgctgacgaggcagcacgcgccgttatgaagccaggcgaagaagcgtatcgcgacattgtagctgaattcgggccgggcatccttcgtgcggatggcgagatcgatcgccagaaactgggtgctatccgcttttcggacgaacaacaacgtaaggtgctgaattcgattgtaggtcctgcagtcctgaagaagatgctcgcggagtgggaagctcatatcgggtcaggcgccaagacggttgtgctggatatcccgctgctgttcgaatccggattgcaatcgtggatggacaaagttctcgtggtgtacgtcgatgatgatgttcagttacgccgccttatggcacgtaacgggtttactgaagaagaagctctgaagcgcattcgttcacagtggcccagtgcggagaaagttaaacgtgcagacgctgtcatcgacaataatggcaatattgaagaaacccgccgccagctgctggacattttacaccagtgggatctgctggacaaaggtggctccggccaccatcatcaccatcac

SEQ ID NO: 1522 - protein, 211 aa, synthetic construct
  REGION 1..211: note = Variant of 3'O-kinase
MRVTIGLTGGIAAGKSTVSAMMRELGLPVIDADEAARAVMKPGEEAYRDIVAEFGPGILRADGEIDRQKLGAIRFSDEQQRKVLNSIVGPAVLKKMLAEWEAHIGSGAKTVVLDIPLLFESGLQSWMDKVLVVYVDDDVQLRRLMARNGFTEEEALKRIRSQWPSAEKVKRADAVIDNNGNIEETRRQLLDILHQWDLLDKGGSGHHHHHH

SEQ ID NO: 1523 - DNA, 633 bp, synthetic construct
  misc_feature 1..633: note = Variant of 3'O-kinase
  source 1..633: mol_type = other DNA
atggcggttaccattggtttaacaggagggatcgcagcgggcaaatcgactgtgagtgccatgatgcgtgaactgggtctgccggtcatcgatgctgacgaggcagcacgcgccgttatgaagccaggcgaagaagcgtatcgcgacattgtagctgaattcgggccgggcatccttcgtgcggatggcgagatcgatcgccagaaactgggtgctatccgcttttcggacgaacaacaacgtaaggtgctgaattcgattgtaggtcctgcagtcctgaagaagatgctcgcggagtgggaagctcatatcgggtcaggcgccaagacggttgtgctggatatcccgctgctgttcgaatccggattgcaatcgtgggcggacaaagttctcgtggtgtacgtcgatgatgatgttcagttacgccgccttatggcacgtaacgggtttactgaagaagaagctctgaagcgcattcgttcacagtggcccagtgcggagaaagttaaacgtgcagacgctgtcatcgacaataatggcaatattgaagaaacccgccgccagctgctggacattttacaccagtgggatctgctggacaaaggtggctccggccaccatcatcaccatcac

SEQ ID NO: 1524 - protein, 211 aa, synthetic construct
  REGION 1..211: note = Variant of 3'O-kinase
MAVTIGLTGGIAAGKSTVSAMMRELGLPVIDADEAARAVMKPGEEAYRDIVAEFGPGILRADGEIDRQKLGAIRFSDEQQRKVLNSIVGPAVLKKMLAEWEAHIGSGAKTVVLDIPLLFESGLQSWADKVLVVYVDDDVQLRRLMARNGFTEEEALKRIRSQWPSAEKVKRADAVIDNNGNIEETRRQLLDILHQWDLLDKGGSGHHHHHH

SEQ ID NO: 1525 - DNA, 633 bp, synthetic construct
  misc_feature 1..633: note = Variant of 3'O-kinase
  source 1..633: mol_type = other DNA
atggcggttaccattggtttaacaggagggatcgcagcgggcaaatcgactgtgagtgccatgatgcgtgaactgggtctgccggtcatcgatgctgacgaggcagcacgcgccgttatgaagccaggcgaagaagcgtatcgcgacattgtagctgaattcgggccgggcatccttcgtgcggatggcgagatcgatcgccagaaactgggtgctatccgcttttcggacgaacaacaacgtaaggtgctgaattcgattgtaggtcctgcagtcctgaagaagatgtgggcggagtgggaagctcatatcgggtcaggcgccaagacggttgtgctggatatcccgctgctgttcgaatccggattgcaatcgtggatggacaaagttctcgtggtgtacgtcgatgatgatgttcagttacgccgccttatggcacgtaacgggtttactgaagaagaagctctgaagcgcattcgttcacagtggcccagtgcggagaaagttaaacgtgcagacgctgtcatcgacaataatggcaatattgaagaaacccgccgccagctgctggacattttacaccagtgggatctgctggacaaaggtggctccggccaccatcatcaccatcac

SEQ ID NO: 1526 - protein, 211 aa, synthetic construct
  REGION 1..211: note = Variant of 3'O-kinase
MAVTIGLTGGIAAGKSTVSAMMRELGLPVIDADEAARAVMKPGEEAYRDIVAEFGPGILRADGEIDRQKLGAIRFSDEQQRKVLNSIVGPAVLKKMWAEWEAHIGSGAKTVVLDIPLLFESGLQSWMDKVLVVYVDDDVQLRRLMARNGFTEEEALKRIRSQWPSAEKVKRADAVIDNNGNIEETRRQLLDILHQWDLLDKGGSGHHHHHH

SEQ ID NO: 1527 - DNA, 633 bp, synthetic construct
  misc_feature 1..633: note = Variant of 3'O-kinase
  source 1..633: mol_type = other DNA
atggcggttaccattggtttaacaggagggatcgcagcgggcaaatcgactgtgagtgccatgatgcgtgaactgggtctgccggtcatcgatgctgacgaggcagcacgcgccgttatgaagccaggcgaagaagcgtatcgcgacattgtagctgaattcgggccgggcatccttcgtgcggatggcgagatcgatcgccagaaactgggtgctatccgctttggggacgaacaacaacgtaaggtgctgaattcgattgtaggtcctgcagtcctgaagaagatgctcgcggagtgggaagctcatatcgggtcaggcgccaagacggttgtgctggatatcccgctgctgttcgaatccggattgcaatcgtggatggacaaagttctcgtggtgtacgtcgatgatgatgttcagttacgccgccttatggcacgtaacgggtttactgaagaagaagctctgaagcgcattcgttcacagtggcccagtgcggagaaagttaaacgtgcagacgctgtcatcgacaataatggcaatattgaagaaacccgccgccagctgctggacattttacaccagtgggatctgctggacaaaggtggctccggccaccatcatcaccatcac

SEQ ID NO: 1528 - protein, 211 aa, synthetic construct
  REGION 1..211: note = Variant of 3'O-kinase
MAVTIGLTGGIAAGKSTVSAMMRELGLPVIDADEAARAVMKPGEEAYRDIVAEFGPGILRADGEIDRQKLGAIRFGDEQQRKVLNSIVGPAVLKKMLAEWEAHIGSGAKTVVLDIPLLFESGLQSWMDKVLVVYVDDDVQLRRLMARNGFTEEEALKRIRSQWPSAEKVKRADAVIDNNGNIEETRRQLLDILHQWDLLDKGGSGHHHHHH

SEQ ID NO: 1529 - DNA, 633 bp, synthetic construct
  misc_feature 1..633: note = Variant of 3'O-kinase
  source 1..633: mol_type = other DNA
atggcggttaccattggtttaacaggagggatcgcagcgggcaaatcgactgtgagtgccatgatgcgtgaactgggtctgccggtcatcgatgctgacgaggcagcacgcgccgttatgaagccaggcgaagaagcgtatcgcggtattgtagctgaattcgggccgggcatccttcgtgcggatggcgagatcgatcgccagaaactgggtgctatccgcttttcggacgaacaacaacgtaaggtgctgaattcgattgtaggtcctgcagtcctgaagaagatgctcgcggagtgggaagctcatatcgggtcaggcgccaagacggttgtgctggatatcccgctgctgttcgaatccggattgcaatcgtggatggacaaagttctcgtggtgtacgtcgatgatgatgttcagttacgccgccttatggcacgtaacgggtttactgaagaagaagctctgaagcgcattcgttcacagtggcccagtgcggagaaagttaaacgtgcagacgctgtcatcgacaataatggcaatattgaagaaacccgccgccagctgctggacattttacaccagtgggatctgctggacaaaggtggctccggccaccatcatcaccatcac

SEQ ID NO: 1530 - protein, 211 aa, synthetic construct
  REGION 1..211: note = Variant of 3'O-kinase
MAVTIGLTGGIAAGKSTVSAMMRELGLPVIDADEAARAVMKPGEEAYRGIVAEFGPGILRADGEIDRQKLGAIRFSDEQQRKVLNSIVGPAVLKKMLAEWEAHIGSGAKTVVLDIPLLFESGLQSWMDKVLVVYVDDDVQLRRLMARNGFTEEEALKRIRSQWPSAEKVKRADAVIDNNGNIEETRRQLLDILHQWDLLDKGGSGHHHHHH

SEQ ID NO: 1531 - DNA, 633 bp, synthetic construct
  misc_feature 1..633: note = Variant of 3'O-kinase
  source 1..633: mol_type = other DNA
atggcggttaccattggtttaacaggagggatcgcagcgggcaaatcgactgtgagtgccatgatgcgtgaactgggtctgccggtcatcgatgctgacgaggcagcacgcgccgttatgaagccaggcgaagaagcgtatcgcaatattgtagctgaattcgggccgggcatccttcgtgcggatggcgagatcgatcgccagaaactgggtgctatccgcttttcggacgaacaacaacgtaaggtgctgaattcgattgtaggtcctgcagtcctgaagaagatgctcgcggagtgggaagctcatatcgggtcaggcgccaagacggttgtgctggatatcccgctgctgttcgaatccggattgcaatcgtggatggacaaagttctcgtggtgtacgtcgatgatgatgttcagttacgccgccttatggcacgtaacgggtttactgaagaagaagctctgaagcgcattcgttcacagtggcccagtgcggagaaagttaaacgtgcagacgctgtcatcgacaataatggcaatattgaagaaacccgccgccagctgctggacattttacaccagtgggatctgctggacaaaggtggctccggccaccatcatcaccatcac

SEQ ID NO: 1532 - protein, 211 aa, synthetic construct
  REGION 1..211: note = Variant of 3'O-kinase
MAVTIGLTGGIAAGKSTVSAMMRELGLPVIDADEAARAVMKPGEEAYRNIVAEFGPGILRADGEIDRQKLGAIRFSDEQQRKVLNSIVGPAVLKKMLAEWEAHIGSGAKTVVLDIPLLFESGLQSWMDKVLVVYVDDDVQLRRLMARNGFTEEEALKRIRSQWPSAEKVKRADAVIDNNGNIEETRRQLLDILHQWDLLDKGGSGHHHHHH

SEQ ID NO: 1533 - DNA, 633 bp, synthetic construct
  misc_feature 1..633: note = Variant of 3'O-kinase
  source 1..633: mol_type = other DNA
atggcggttaccattggtttaacaggagggatcgcaatgggcaaatcgactgtgagtgccatgatgcgtgaactgggtctgccggtcatcgatgctgacgaggcagcacgcgccgttatgaagccaggcgaagaagcgtatcgcgacattgtagctgaattcgggccgggcatccttcgtgcggatggcgagatcgatcgccagaaactgggtgctatccgcttttcggacgaacaacaacgtaaggtgctgaattcgattgtaggtcctgcagtcctgaagaagatgctcgcggagtgggaagctcatatcgggtcaggcgccaagacggttgtgctggatatcccgctgctgttcgaatccggattgcaatcgtggatggacaaagttctcgtggtgtacgtcgatgatgatgttcagttacgccgccttatggcacgtaacgggtttactgaagaagaagctctgaagcgcattcgttcacagtggcccagtgcggagaaagttaaacgtgcagacgctgtcatcgacaataatggcaatattgaagaaacccgccgccagctgctggacattttacaccagtgggatctgctggacaaaggtggctccggccaccatcatcaccatcac

SEQ ID NO: 1534 - protein, 211 aa, synthetic construct
  REGION 1..211: note = Variant of 3'O-kinase
MAVTIGLTGGIAMGKSTVSAMMRELGLPVIDADEAARAVMKPGEEAYRDIVAEFGPGILRADGEIDRQKLGAIRFSDEQQRKVLNSIVGPAVLKKMLAEWEAHIGSGAKTVVLDIPLLFESGLQSWMDKVLVVYVDDDVQLRRLMARNGFTEEEALKRIRSQWPSAEKVKRADAVIDNNGNIEETRRQLLDILHQWDLLDKGGSGHHHHHH

SEQ ID NO: 1535 - DNA, 633 bp, synthetic construct
  misc_feature 1..633: note = Variant of 3'O-kinase
  source 1..633: mol_type = other DNA
atggcggttaccattggtttaacaggagggatcgcagcgggcaaatcgactgtgagtgccatgatgcgtgaactgggtctgccggtcatcgatgctgacgaggcagcacgcgccgttatgaagccaggcgaagaagcgtatcgcgacattgtagctgaattcgggccgttgatccttcgtgcggatggcgagatcgatcgccagaaactgggtgctatccgcttttcggacgaacaacaacgtaaggtgctgaattcgattgtaggtcctgcagtcctgaagaagatgctcgcggagtgggaagctcatatcgggtcaggcgccaagacggttgtgctggatatcccgctgctgttcgaatccggattgcaatcgtggatggacaaagttctcgtggtgtacgtcgatgatgatgttcagttacgccgccttatggcacgtaacgggtttactgaagaagaagctctgaagcgcattcgttcacagtggcccagtgcggagaaagttaaacgtgcagacgctgtcatcgacaataatggcaatattgaagaaacccgccgccagctgctggacattttacaccagtgggatctgctggacaaaggtggctccggccaccatcatcaccatcac

SEQ ID NO: 1536 - protein, 211 aa, synthetic construct
  REGION 1..211: note = Variant of 3'O-kinase
MAVTIGLTGGIAAGKSTVSAMMRELGLPVIDADEAARAVMKPGEEAYRDIVAEFGPLILRADGEIDRQKLGAIRFSDEQQRKVLNSIVGPAVLKKMLAEWEAHIGSGAKTVVLDIPLLFESGLQSWMDKVLVVYVDDDVQLRRLMARNGFTEEEALKRIRSQWPSAEKVKRADAVIDNNGNIEETRRQLLDILHQWDLLDKGGSGHHHHHH

SEQ ID NO: 1537 - DNA, 633 bp, synthetic construct
  misc_feature 1..633: note = Variant of 3'O-kinase
  source 1..633: mol_type = other DNA
atggcggttaccattggtttaacaggagggatcgcagcgggcaaatcgactgtgagtgccatgatgcgtgaactgggtctgccggtcatcgatgctgacgagttggcacgcgccgttatgaagccaggcgaagaagcgtatcgcgacattgtagctgaattcgggccgggcatccttcgtgcggatggcgagatcgatcgccagaaactgggtgctatccgcttttcggacgaacaacaacgtaaggtgctgaattcgattgtaggtcctgcagtcctgaagaagatgctcgcggagtgggaagctcatatcgggtcaggcgccaagacggttgtgctggatatcccgctgctgttcgaatccggattgcaatcgtggatggacaaagttctcgtggtgtacgtcgatgatgatgttcagttacgccgccttatggcacgtaacgggtttactgaagaagaagctctgaagcgcattcgttcacagtggcccagtgcggagaaagttaaacgtgcagacgctgtcatcgacaataatggcaatattgaagaaacccgccgccagctgctggacattttacaccagtgggatctgctggacaaaggtggctccggccaccatcatcaccatcac

SEQ ID NO: 1538 - protein, 211 aa, synthetic construct
  REGION 1..211: note = Variant of 3'O-kinase
MAVTIGLTGGIAAGKSTVSAMMRELGLPVIDADELARAVMKPGEEAYRDIVAEFGPGILRADGEIDRQKLGAIRFSDEQQRKVLNSIVGPAVLKKMLAEWEAHIGSGAKTVVLDIPLLFESGLQSWMDKVLVVYVDDDVQLRRLMARNGFTEEEALKRIRSQWPSAEKVKRADAVIDNNGNIEETRRQLLDILHQWDLLDKGGSGHHHHHH

SEQ ID NO: 1539 - DNA, 633 bp, synthetic construct
  misc_feature 1..633: note = Variant of 3'O-kinase
  source 1..633: mol_type = other DNA
atggcggttaccattggtttaacaggagggatcgcagcgggcaaatcgactgtgagtgccatgatgcgtgaactgggtctgccggtcatcgatgctgacgaggcagcacgcgccgttatgaagccaggcgaagaagcgtatcgcgacattgtagctgaattcgggccgggcatccttcgtgcggatggcgagatcgatcgccagaaactgggtgctatccgcttttcggacgaacaacaacgtaaggtgctgaattcgattgtaggtcctgcagtcctgaagaagatgctcgcggagtgggaagctcatatcgggtcaggcgccaagacggttgtgctggatatcccgctgctgttcgaatccggattgcaatcgtggatggacaaagttctcgtggtgtacgtcgatgatgatgttcagttacgccgccttatggcacgtaacgggtttactgaagaagaagctctgaagcgcattcgttcacagtggcccagtgcggcgaaagttaaacgtgcagacgctgtcatcgacaataatggcaatattgaagaaacccgccgccagctgctggacattttacaccagtgggatctgctggacaaaggtggctccggccaccatcatcaccatcac

SEQ ID NO: 1540 - protein, 211 aa, synthetic construct
  REGION 1..211: note = Variant of 3'O-kinase
MAVTIGLTGGIAAGKSTVSAMMRELGLPVIDADEAARAVMKPGEEAYRDIVAEFGPGILRADGEIDRQKLGAIRFSDEQQRKVLNSIVGPAVLKKMLAEWEAHIGSGAKTVVLDIPLLFESGLQSWMDKVLVVYVDDDVQLRRLMARNGFTEEEALKRIRSQWPSAAKVKRADAVIDNNGNIEETRRQLLDILHQWDLLDKGGSGHHHHHH

SEQ ID NO: 1541 - DNA, 633 bp, synthetic construct
  misc_feature 1..633: note = Variant of 3'O-kinase
  source 1..633: mol_type = other DNA
atggcggttaccattggtttaacaggagggatcgcagcgggcaaatcgactgtgagtgccatgatgcgtgaactgggtctgccggtcatcgatgctgacgaggcagcacgcgccgttatgaagccaggcgaagaagcgtatcgcgacattgtagctgaattcgggccgggcatccttcgtgcggatggcgagatcgatcgccagaaactgggtgctatccgcttttcggacgaacaaacgcgtaaggtgctgaattcgattgtaggtcctgcagtcctgaagaagatgctcgcggagtgggaagctcatatcgggtcaggcgccaagacggttgtgctggatatcccgctgctgttcgaatccggattgcaatcgtggatggacaaagttctcgtggtgtacgtcgatgatgatgttcagttacgccgccttatggcacgtaacgggtttactgaagaagaagctctgaagcgcattcgttcacagtggcccagtgcggagaaagttaaacgtgcagacgctgtcatcgacaataatggcaatattgaagaaacccgccgccagctgctggacattttacaccagtgggatctgctggacaaaggtggctccggccaccatcatcaccatcac

SEQ ID NO: 1542 - protein, 211 aa, synthetic construct
  REGION 1..211: note = Variant of 3'O-kinase
MAVTIGLTGGIAAGKSTVSAMMRELGLPVIDADEAARAVMKPGEEAYRDIVAEFGPGILRADGEIDRQKLGAIRFSDEQTRKVLNSIVGPAVLKKMLAEWEAHIGSGAKTVVLDIPLLFESGLQSWMDKVLVVYVDDDVQLRRLMARNGFTEEEALKRIRSQWPSAEKVKRADAVIDNNGNIEETRRQLLDILHQWDLLDKGGSGHHHHHH

SEQ ID NO: 1543 - DNA, 633 bp, synthetic construct
  misc_feature 1..633: note = Variant of 3'O-kinase
  source 1..633: mol_type = other DNA
atggcggttaccattggtttaacaggagggatcgcagcgggcaaatcgactgtgagtgccatgatgcgtgaactgggtctgccggtcatcgatgctgacgaggcagcacgcgccgttatgaagccaggcgaagaagcgtatcgcgttattgtagctgaattcgggccgggcatccttcgtgcggatggcgagatcgatcgccagaaactgggtgctatccgcttttcggacgaacaacaacgtaaggtgctgaattcgattgtaggtcctgcagtcctgaagaagatgctcgcggagtgggaagctcatatcgggtcaggcgccaagacggttgtgctggatatcccgctgctgttcgaatccggattgcaatcgtggatggacaaagttctcgtggtgtacgtcgatgatgatgttcagttacgccgccttatggcacgtaacgggtttactgaagaagaagctctgaagcgcattcgttcacagtggcccagtgcggagaaagttaaacgtgcagacgctgtcatcgacaataatggcaatattgaagaaacccgccgccagctgctggacattttacaccagtgggatctgctggacaaaggtggctccggccaccatcatcaccatcac

SEQ ID NO: 1544 - protein, 211 aa, synthetic construct
  REGION 1..211: note = Variant of 3'O-kinase
MAVTIGLTGGIAAGKSTVSAMMRELGLPVIDADEAARAVMKPGEEAYRVIVAEFGPGILRADGEIDRQKLGAIRFSDEQQRKVLNSIVGPAVLKKMLAEWEAHIGSGAKTVVLDIPLLFESGLQSWMDKVLVVYVDDDVQLRRLMARNGFTEEEALKRIRSQWPSAEKVKRADAVIDNNGNIEETRRQLLDILHQWDLLDKGGSGHHHHHH

SEQ ID NO: 1545 - DNA, 633 bp, synthetic construct
  misc_feature 1..633: note = Variant of 3'O-kinase
  source 1..633: mol_type = other DNA
atggcggttaccattggtttaacaggagggatcgcagcgggcaaatcgactgtgagtgccatgatgcgtgaactgggtctgccggtcatcgatgctgacgaggcagcacgcgccgttatgaagccaggcgaattggcgtatcgcgacattgtagctgaattcgggccgggcatccttcgtgcggatggcgagatcgatcgccagaaactgggtgctatccgcttttcggacgaacaacaacgtaaggtgctgaattcgattgtaggtcctgcagtcctgaagaagatgctcgcggagtgggaagctcatatcgggtcaggcgccaagacggttgtgctggatatcccgctgctgttcgaatccggattgcaatcgtggatggacaaagttctcgtggtgtacgtcgatgatgatgttcagttacgccgccttatggcacgtaacgggtttactgaagaagaagctctgaagcgcattcgttcacagtggcccagtgcggagaaagttaaacgtgcagacgctgtcatcgacaataatggcaatattgaagaaacccgccgccagctgctggacattttacaccagtgggatctgctggacaaaggtggctccggccaccatcatcaccatcac

SEQ ID NO: 1546 - protein, 211 aa, synthetic construct
  REGION 1..211: note = Variant of 3'O-kinase
MAVTIGLTGGIAAGKSTVSAMMRELGLPVIDADEAARAVMKPGELAYRDIVAEFGPGILRADGEIDRQKLGAIRFSDEQQRKVLNSIVGPAVLKKMLAEWEAHIGSGAKTVVLDIPLLFESGLQSWMDKVLVVYVDDDVQLRRLMARNGFTEEEALKRIRSQWPSAEKVKRADAVIDNNGNIEETRRQLLDILHQWDLLDKGGSGHHHHHH

SEQ ID NO: 1547 - DNA, 633 bp, synthetic construct
  misc_feature 1..633: note = Variant of 3'O-kinase
  source 1..633: mol_type = other DNA
atggcggttaccattggtttaacaggagggatcgcagcgggcaaatcgactgtgagtgccatgatgcgtgaactgggtctgccggtctgggatgctgacgaggcagcacgcgccgttatgaagccaggcgaagaagcgtatcgcgacattgtagctgaattcgggccgggcatccttcgtgcggatggcgagatcgatcgccagaaactgggtgctatccgcttttcggacgaacaacaacgtaaggtgctgaattcgattgtaggtcctgcagtcctgaagaagatgctcgcggagtgggaagctcatatcgggtcaggcgccaagacggttgtgctggatatcccgctgctgttcgaatccggattgcaatcgtggatggacaaagttctcgtggtgtacgtcgatgatgatgttcagttacgccgccttatggcacgtaacgggtttactgaagaagaagctctgaagcgcattcgttcacagtggcccagtgcggagaaagttaaacgtgcagacgctgtcatcgacaataatggcaatattgaagaaacccgccgccagctgctggacattttacaccagtgggatctgctggacaaaggtggctccggccaccatcatcaccatcac

SEQ ID NO: 1548 - protein, 211 aa, synthetic construct
  REGION 1..211: note = Variant of 3'O-kinase
MAVTIGLTGGIAAGKSTVSAMMRELGLPVWDADEAARAVMKPGEEAYRDIVAEFGPGILRADGEIDRQKLGAIRFSDEQQRKVLNSIVGPAVLKKMLAEWEAHIGSGAKTVVLDIPLLFESGLQSWMDKVLVVYVDDDVQLRRLMARNGFTEEEALKRIRSQWPSAEKVKRADAVIDNNGNIEETRRQLLDILHQWDLLDKGGSGHHHHHH

SEQ ID NO: 1549 - DNA, 633 bp, synthetic construct
  misc_feature 1..633: note = Variant of 3'O-kinase
  source 1..633: mol_type = other DNA
atggcggttaccattggtttaacaggagggatcgcagcgggcaaatcgactgtgagtgccatgatgcgtgaactgggtctgccggtcatcgatgctgacgaggcagcacgcgccgttatgaagccaggcgaagaagcgtatcgcgacattgtagctgaattcgggccgggcatccttcgtgcggatggcgagatcgatcgccagaaactgggtgctatccgcttttcggacgtgcaacaacgtaaggtgctgaattcgattgtaggtcctgcagtcctgaagaagatgctcgcggagtgggaagctcatatcgggtcaggcgccaagacggttgtgctggatatcccgctgctgttcgaatccggattgcaatcgtggatggacaaagttctcgtggtgtacgtcgatgatgatgttcagttacgccgccttatggcacgtaacgggtttactgaagaagaagctctgaagcgcattcgttcacagtggcccagtgcggagaaagttaaacgtgcagacgctgtcatcgacaataatggcaatattgaagaaacccgccgccagctgctggacattttacaccagtgggatctgctggacaaaggtggctccggccaccatcatcaccatcac

SEQ ID NO: 1550 - protein, 211 aa, synthetic construct
  REGION 1..211: note = Variant of 3'O-kinase
MAVTIGLTGGIAAGKSTVSAMMRELGLPVIDADEAARAVMKPGEEAYRDIVAEFGPGILRADGEIDRQKLGAIRFSDVQQRKVLNSIVGPAVLKKMLAEWEAHIGSGAKTVVLDIPLLFESGLQSWMDKVLVVYVDDDVQLRRLMARNGFTEEEALKRIRSQWPSAEKVKRADAVIDNNGNIEETRRQLLDILHQWDLLDKGGSGHHHHHH

SEQ ID NO: 1551 - DNA, 633 bp, synthetic construct
  misc_feature 1..633: note = Variant of 3'O-kinase
  source 1..633: mol_type = other DNA
atggcggttaccattggtttaacaggagggatcgcagcgggcaaatcgactgtgagtgccatgatgcgtgaactgggtctgccggtcatcgatgctgacgaggcagcacgcgccgttatgaagccaggcgaagaagcgtatcgcgacattgtagctgaattcgggccgggcatccttcgtgcggatggcgagatcgatcgccagaaactgggtgctatccgcttttcggacgaacaacaacgtaaggtgctgaattcgattgtaggtcctgcagtcctgaagaagatgctcgcggagtgggaagctcatatcgggtcaggcgccaagacggttgtgctggatatcccgctgctgttcgaatccggattgcaatcgtggatggacaaagttctcgtgaattacgtcgatgatgatgttcagttacgccgccttatggcacgtaacgggtttactgaagaagaagctctgaagcgcattcgttcacagtggcccagtgcggagaaagttaaacgtgcagacgctgtcatcgacaataatggcaatattgaagaaacccgccgccagctgctggacattttacaccagtgggatctgctggacaaaggtggctccggccaccatcatcaccatcac

SEQ ID NO: 1552 - protein, 211 aa, synthetic construct
  REGION 1..211: note = Variant of 3'O-kinase
MAVTIGLTGGIAAGKSTVSAMMRELGLPVIDADEAARAVMKPGEEAYRDIVAEFGPGILRADGEIDRQKLGAIRFSDEQQRKVLNSIVGPAVLKKMLAEWEAHIGSGAKTVVLDIPLLFESGLQSWMDKVLVNYVDDDVQLRRLMARNGFTEEEALKRIRSQWPSAEKVKRADAVIDNNGNIEETRRQLLDILHQWDLLDKGGSGHHHHHH

SEQ ID NO: 1553 - DNA, 633 bp, synthetic construct
  misc_feature 1..633: note = Variant of 3'O-kinase
  source 1..633: mol_type = other DNA
atggcggttaccattggtttaacaggagggatcgcagcgggcaaatcgactgtgagtgccatgatgcgtgaactgggtctgccggtcatcgatgctgacgaggcagcacgcgccgttatgaagccaggcgaagaagcgtatcgcgacattgtagctgaattcgggctgggcatccttcgtgcggatggcgagatcgatcgccagaaactgggtgctatccgcttttcggacgaacaacaacgtaaggtgctgaattcgattgtaggtcctgcagtcctgaagaagatgctcgcggagtgggaagctcatatcgggtcaggcgccaagacggttgtgctggatatcccgctgctgttcgaatccggattgcaatcgtggatggacaaagttctcgtggtgtacgtcgatgatgatgttcagttacgccgccttatggcacgtaacgggtttactgaagaagaagctctgaagcgcattcgttcacagtggcccagtgcggagaaagttaaacgtgcagacgctgtcatcgacaataatggcaatattgaagaaacccgccgccagctgctggacattttacaccagtgggatctgctggacaaaggtggctccggccaccatcatcaccatcac

SEQ ID NO: 1554 - protein, 211 aa, synthetic construct
  REGION 1..211: note = Variant of 3'O-kinase
MAVTIGLTGGIAAGKSTVSAMMRELGLPVIDADEAARAVMKPGEEAYRDIVAEFGLGILRADGEIDRQKLGAIRFSDEQQRKVLNSIVGPAVLKKMLAEWEAHIGSGAKTVVLDIPLLFESGLQSWMDKVLVVYVDDDVQLRRLMARNGFTEEEALKRIRSQWPSAEKVKRADAVIDNNGNIEETRRQLLDILHQWDLLDKGGSGHHHHHH

SEQ ID NO: 1555 - DNA, 633 bp, synthetic construct
  misc_feature 1..633: note = Variant of 3'O-kinase
  source 1..633: mol_type = other DNA
atggcggttaccattggtttaacaggagggatcgcagcgggcaaatcgactgtgagtgccatgatgcgtgaactgggtctgccggtcatcgatgctgacgaggcagcacgcgccgttatgaagccaggcgaagaagcgtatcgcgacattgtagctgaattcgggccgggcatccttcgtgcggatggcgagatcgatcgccagaaactgggtgctatccgcttttcggacgaacaacaacgtaaggagctgaattcgattgtaggtcctgcagtcctgaagaagatgctcgcggagtgggaagctcatatcgggtcaggcgccaagacggttgtgctggatatcccgctgctgttcgaatccggattgcaatcgtggatggacaaagttctcgtggtgtacgtcgatgatgatgttcagttacgccgccttatggcacgtaacgggtttactgaagaagaagctctgaagcgcattcgttcacagtggcccagtgcggagaaagttaaacgtgcagacgctgtcatcgacaataatggcaatattgaagaaacccgccgccagctgctggacattttacaccagtgggatctgctggacaaaggtggctccggccaccatcatcaccatcac

SEQ ID NO: 1556 - protein, 211 aa, synthetic construct
  REGION 1..211: note = Variant of 3'O-kinase
MAVTIGLTGGIAAGKSTVSAMMRELGLPVIDADEAARAVMKPGEEAYRDIVAEFGPGILRADGEIDRQKLGAIRFSDEQQRKELNSIVGPAVLKKMLAEWEAHIGSGAKTVVLDIPLLFESGLQSWMDKVLVVYVDDDVQLRRLMARNGFTEEEALKRIRSQWPSAEKVKRADAVIDNNGNIEETRRQLLDILHQWDLLDKGGSGHHHHHH

SEQ ID NO: 1557 - DNA, 633 bp, synthetic construct
  misc_feature 1..633: note = Variant of 3'O-kinase
  source 1..633: mol_type = other DNA
atggcggttaccattggtttaacaggagggatcgcagcgggcaaatcgactgtgagtgccatgatgcgtgaactgggtctgccggtcatcgatgctgacgaggcagcacgcgccgttatgaagccaggcgaagaagcgtatcgcgacattgtagctgaattcgggccgggcatccttcgtgcggatggcgagatcgatcgccagaaactgggtgctatccgcttttcggacgaacaacaacgtaaggtgctgaattcgattgtaggtcctgcagtcctgaagaagatgctcgcggagtgggaagctcatatcgggtcaggcgccaagacggttgtgctggatatcccgctgctgttcgaatccggattgcaatcgtggatggacaaagttctcgtggtgtacgtcgatgatgatgttcagttacgccgccttatggcacgtaacgggtttactgaagaagaagctctgaagcgcattcgttcacagtggcccagtgcggagaaagttaaacgtgcagacgctgtcatcgacaataatggcaatattgaagaaacccgccgccagctgctgggtattttacaccagtgggatctgctggacaaaggtggctccggccaccatcatcaccatcac

SEQ ID NO: 1558 - protein, 211 aa, synthetic construct
  REGION 1..211: note = Variant of 3'O-kinase
MAVTIGLTGGIAAGKSTVSAMMRELGLPVIDADEAARAVMKPGEEAYRDIVAEFGPGILRADGEIDRQKLGAIRFSDEQQRKVLNSIVGPAVLKKMLAEWEAHIGSGAKTVVLDIPLLFESGLQSWMDKVLVVYVDDDVQLRRLMARNGFTEEEALKRIRSQWPSAEKVKRADAVIDNNGNIEETRRQLLGILHQWDLLDKGGSGHHHHHH

SEQ ID NO: 1559 - DNA, 633 bp, synthetic construct
  misc_feature 1..633: note = Variant of 3'O-kinase
  source 1..633: mol_type = other DNA
atggcggttaccattggtttaacaggagggatcgcagcgggcaaatcgactgtgagtgccatgatgcgtgaactgggtctgccggtcatcgatgctgacgaggcagcacgcgccgttatgaagccaggcgaagaagcgtatcgcgacattgtagctgaattcgggccgggcatccttcgtgcggatggcgagatcgatcgccagaaactgggtgctatccgcttttcggacgaacaacaacgtaaggtgctgaattcgattgtaggtcctgcagtcctgaagaagatgctcgcggagtgggaagctcatatcgggtcaggcgccaagacggttgtgctggatatcccgctgctgttcgaatccggattgcaatcgtggatggacaaagttctcgtggtgtacgtcgatgatgatgttcagttacgccgccttatggcacgtaacgggtttactgaagaacaggctctgaagcgcattcgttcacagtggcccagtgcggagaaagttaaacgtgcagacgctgtcatcgacaataatggcaatattgaagaaacccgccgccagctgctggacattttacaccagtgggatctgctggacaaaggtggctccggccaccatcatcaccatcac

SEQ ID NO: 1560 - protein, 211 aa, synthetic construct
  REGION 1..211: note = Variant of 3'O-kinase
MAVTIGLTGGIAAGKSTVSAMMRELGLPVIDADEAARAVMKPGEEAYRDIVAEFGPGILRADGEIDRQKLGAIRFSDEQQRKVLNSIVGPAVLKKMLAEWEAHIGSGAKTVVLDIPLLFESGLQSWMDKVLVVYVDDDVQLRRLMARNGFTEEQALKRIRSQWPSAEKVKRADAVIDNNGNIEETRRQLLDILHQWDLLDKGGSGHHHHHH

SEQ ID NO: 1561 - DNA, 633 bp, synthetic construct
  misc_feature 1..633: note = Variant of 3'O-kinase
  source 1..633: mol_type = other DNA
atggcggttaccattggtttaacaggagggatcgcagcgggcaaatcgactgtgagtgccatgatgcgtgaactgggtctgccggtcatcgatgctgacgagcgtgcacgcgccgttatgaagccaggcgaagaagcgtatcgcgacattgtagctgaattcgggccgggcatccttcgtgcggatggcgagatcgatcgccagaaactgggtgctatccgcttttcggacgaacaacaacgtaaggtgctgaattcgattgtaggtcctgcagtcctgaagaagatgctcgcggagtgggaagctcatatcgggtcaggcgccaagacggttgtgctggatatcccgctgctgttcgaatccggattgcaatcgtggatggacaaagttctcgtggtgtacgtcgatgatgatgttcagttacgccgccttatggcacgtaacgggtttactgaagaagaagctctgaagcgcattcgttcacagtggcccagtgcggagaaagttaaacgtgcagacgctgtcatcgacaataatggcaatattgaagaaacccgccgccagctgctggacattttacaccagtgggatctgctggacaaaggtggctccggccaccatcatcaccatcac

SEQ ID NO: 1562 - protein, 211 aa, synthetic construct
  REGION 1..211: note = Variant of 3'O-kinase
MAVTIGLTGGIAAGKSTVSAMMRELGLPVIDADERARAVMKPGEEAYRDIVAEFGPGILRADGEIDRQKLGAIRFSDEQQRKVLNSIVGPAVLKKMLAEWEAHIGSGAKTVVLDIPLLFESGLQSWMDKVLVVYVDDDVQLRRLMARNGFTEEEALKRIRSQWPSAEKVKRADAVIDNNGNIEETRRQLLDILHQWDLLDKGGSGHHHHHH

SEQ ID NO: 1563 - DNA, 633 bp, synthetic construct
  misc_feature 1..633: note = Variant of 3'O-kinase
  source 1..633: mol_type = other DNA
atggcggttaccattggtttaacaggagggatcgcagcgggcaaatcgactgtgagtgccatgatgcgtgaactgggtctgccggtcatcgatgctgacgaggcagcacgcgccgttatgaagccaggcgaagaagcgtatcgcgacattgtacaggaattcgggccgggcatccttcgtgcggatggcgagatcgatcgccagaaactgggtgctatccgcttttcggacgaacaacaacgtaaggtgctgaattcgattgtaggtcctgcagtcctgaagaagatgctcgcggagtgggaagctcatatcgggtcaggcgccaagacggttgtgctggatatcccgctgctgttcgaatccggattgcaatcgtggatggacaaagttctcgtggtgtacgtcgatgatgatgttcagttacgccgccttatggcacgtaacgggtttactgaagaagaagctctgaagcgcattcgttcacagtggcccagtgcggagaaagttaaacgtgcagacgctgtcatcgacaataatggcaatattgaagaaacccgccgccagctgctggacattttacaccagtgggatctgctggacaaaggtggctccggccaccatcatcaccatcac

SEQ ID NO: 1564 - protein, 211 aa, synthetic construct
  REGION 1..211: note = Variant of 3'O-kinase
MAVTIGLTGGIAAGKSTVSAMMRELGLPVIDADEAARAVMKPGEEAYRDIVQEFGPGILRADGEIDRQKLGAIRFSDEQQRKVLNSIVGPAVLKKMLAEWEAHIGSGAKTVVLDIPLLFESGLQSWMDKVLVVYVDDDVQLRRLMARNGFTEEEALKRIRSQWPSAEKVKRADAVIDNNGNIEETRRQLLDILHQWDLLDKGGSGHHHHHH

SEQ ID NO: 1565 - DNA, 633 bp, synthetic construct
  misc_feature 1..633: note = Variant of 3'O-kinase
  source 1..633: mol_type = other DNA
atggcggttaccattggtttaacaggagggatcgcagcgggcaaatcgactgtgagtgccatgatgcgtgaactgggtctgccggtcatcgatgctgacgaggcagcacgcgccgttatgaagccaggcgaagaagcgtatcgcgacattgtagctgaattcgggccgggcatccttcgtgcggatggcgagatcgatcgccagaaactgggtgctatccgcttttcggacgaacaacaacgtaaggtgctgaattcgattgtaggtcctgcagtcctgaagaagatgctcgcggagtgggaagctcatatcgggtcaggcgccaagacggttgtgctggatatcccgctgctgttcgaagagggattgcaatcgtggatggacaaagttctcgtggtgtacgtcgatgatgatgttcagttacgccgccttatggcacgtaacgggtttactgaagaagaagctctgaagcgcattcgttcacagtggcccagtgcggagaaagttaaacgtgcagacgctgtcatcgacaataatggcaatattgaagaaacccgccgccagctgctggacattttacaccagtgggatctgctggacaaaggtggctccggccaccatcatcaccatcac

SEQ ID NO: 1566 - protein, 211 aa, synthetic construct
  REGION 1..211: note = Variant of 3'O-kinase
MAVTIGLTGGIAAGKSTVSAMMRELGLPVIDADEAARAVMKPGEEAYRDIVAEFGPGILRADGEIDRQKLGAIRFSDEQQRKVLNSIVGPAVLKKMLAEWEAHIGSGAKTVVLDIPLLFEEGLQSWMDKVLVVYVDDDVQLRRLMARNGFTEEEALKRIRSQWPSAEKVKRADAVIDNNGNIEETRRQLLDILHQWDLLDKGGSGHHHHHH

SEQ ID NO: 1567 - DNA, 633 bp, synthetic construct
  misc_feature 1..633: note = Variant of 3'O-kinase
  source 1..633: mol_type = other DNA
atggcggttaccattggtttaacaggagggatcgcagcgggcaaatcgactgtgagtgccatgatgcgtgaactgggtctgccggtcatcgatgctgacgaggcagcacgcgccgttatgaagccaggcgaagaagcgtatcgcgacattgtagctgaattcgggccgggcatccttgtggcggatggcgagatcgatcgccagaaactgggtgctatccgcttttcggacgaacaacaacgtaaggtgctgaattcgattgtaggtcctgcagtcctgaagaagatgctcgcggagtgggaagctcatatcgggtcaggcgccaagacggttgtgctggatatcccgctgctgttcgaatccggattgcaatcgtggatggacaaagttctcgtggtgtacgtcgatgatgatgttcagttacgccgccttatggcacgtaacgggtttactgaagaagaagctctgaagcgcattcgttcacagtggcccagtgcggagaaagttaaacgtgcagacgctgtcatcgacaataatggcaatattgaagaaacccgccgccagctgctggacattttacaccagtgggatctgctggacaaaggtggctccggccaccatcatcaccatcac

SEQ ID NO: 1568 - protein, 211 aa, synthetic construct
  REGION 1..211: note = Variant of 3'O-kinase
MAVTIGLTGGIAAGKSTVSAMMRELGLPVIDADEAARAVMKPGEEAYRDIVAEFGPGILVADGEIDRQKLGAIRFSDEQQRKVLNSIVGPAVLKKMLAEWEAHIGSGAKTVVLDIPLLFESGLQSWMDKVLVVYVDDDVQLRRLMARNGFTEEEALKRIRSQWPSAEKVKRADAVIDNNGNIEETRRQLLDILHQWDLLDKGGSGHHHHHH

SEQ ID NO: 1569 - DNA, 633 bp, synthetic construct
  misc_feature 1..633: note = Variant of 3'O-kinase
  source 1..633: mol_type = other DNA
atggcggttaccattggtttaacaggagggatcgcagcgggcaaatcgactgtgagtgccatgatgcgtgaactgggtctgccggtcatcgatgctgacgaggcatctcgcgccgttatgaagccaggcgaagaagcgtatcgcgacattgtagctgaattcgggccgggcatccttcgtgcggatggcgagatcgatcgccagaaactgggtgctatccgcttttcggacgaacaacaacgtaaggtgctgaattcgattgtaggtcctgcagtcctgaagaagatgctcgcggagtgggaagctcatatcgggtcaggcgccaagacggttgtgctggatatcccgctgctgttcgaatccggattgcaatcgtggatggacaaagttctcgtggtgtacgtcgatgatgatgttcagttacgccgccttatggcacgtaacgggtttactgaagaagaagctctgaagcgcattcgttcacagtggcccagtgcggagaaagttaaacgtgcagacgctgtcatcgacaataatggcaatattgaagaaacccgccgccagctgctggacattttacaccagtgggatctgctggacaaaggtggctccggccaccatcatcaccatcac

SEQ ID NO: 1570 - protein, 211 aa, synthetic construct
  REGION 1..211: note = Variant of 3'O-kinase
MAVTIGLTGGIAAGKSTVSAMMRELGLPVIDADEASRAVMKPGEEAYRDIVAEFGPGILRADGEIDRQKLGAIRFSDEQQRKVLNSIVGPAVLKKMLAEWEAHIGSGAKTVVLDIPLLFESGLQSWMDKVLVVYVDDDVQLRRLMARNGFTEEEALKRIRSQWPSAEKVKRADAVIDNNGNIEETRRQLLDILHQWDLLDKGGSGHHHHHH

SEQ ID NO: 1571 - DNA, 633 bp, synthetic construct
  misc_feature 1..633: note = Variant of 3'O-kinase
  source 1..633: mol_type = other DNA
atggcggttaccattggtttaacaggagggatcgcagcgggcaaatcgactgtgagtgccatgatgcgtgaactgggtctgccggtcatcgatgctgacgaggcagcacgcgccgttatgaagccaggcgaagaagcgtatcgcgacattgtagctgaattcgggccgggcatccttcgtgcggatggcgagatcgatcgccagaaactgggtgctatccgcttttcggacgaacaacaacgtcatgtgctgaattcgattgtaggtcctgcagtcctgaagaagatgctcgcggagtgggaagctcatatcgggtcaggcgccaagacggttgtgctggatatcccgctgctgttcgaatccggattgcaatcgtggatggacaaagttctcgtggtgtacgtcgatgatgatgttcagttacgccgccttatggcacgtaacgggtttactgaagaagaagctctgaagcgcattcgttcacagtggcccagtgcggagaaagttaaacgtgcagacgctgtcatcgacaataatggcaatattgaagaaacccgccgccagctgctggacattttacaccagtgggatctgctggacaaaggtggctccggccaccatcatcaccatcac

SEQ ID NO: 1572 - protein, 211 aa, synthetic construct
  REGION 1..211: note = Variant of 3'O-kinase
MAVTIGLTGGIAAGKSTVSAMMRELGLPVIDADEAARAVMKPGEEAYRDIVAEFGPGILRADGEIDRQKLGAIRFSDEQQRHVLNSIVGPAVLKKMLAEWEAHIGSGAKTVVLDIPLLFESGLQSWMDKVLVVYVDDDVQLRRLMARNGFTEEEALKRIRSQWPSAEKVKRADAVIDNNGNIEETRRQLLDILHQWDLLDKGGSGHHHHHH

SEQ ID NO: 1573 - DNA, 633 bp, synthetic construct
  misc_feature 1..633: note = Variant of 3'O-kinase
  source 1..633: mol_type = other DNA
atggcggttaccattggtttaacaggagggatcgcagcgggcaaatcgactgtgagtgccatgatgcgtgaactgggtctgccggtcatcgatgctgacgaggcagcacgcgccgttatgaagccaggcgaagaagcgtatcgcgacattgtagctgaattcgggccgggcatccttcgtgcggatggcgagatcgatcgccagaaactgggtgctatccgcttttcggacgaacaacaacgtaaggtgctgaattcgattgtaggtcctgcagtcctgaagaagatgctcgcggagtgggaagctcatgctgggtcaggcgccaagacggttgtgctggatatcccgctgctgttcgaatccggattgcaatcgtggatggacaaagttctcgtggtgtacgtcgatgatgatgttcagttacgccgccttatggcacgtaacgggtttactgaagaagaagctctgaagcgcattcgttcacagtggcccagtgcggagaaagttaaacgtgcagacgctgtcatcgacaataatggcaatattgaagaaacccgccgccagctgctggacattttacaccagtgggatctgctggacaaaggtggctccggccaccatcatcaccatcac

SEQ ID NO: 1574 - protein, 211 aa, synthetic construct
  REGION 1..211: note = Variant of 3'O-kinase
MAVTIGLTGGIAAGKSTVSAMMRELGLPVIDADEAARAVMKPGEEAYRDIVAEFGPGILRADGEIDRQKLGAIRFSDEQQRKVLNSIVGPAVLKKMLAEWEAHAGSGAKTVVLDIPLLFESGLQSWMDKVLVVYVDDDVQLRRLMARNGFTEEEALKRIRSQWPSAEKVKRADAVIDNNGNIEETRRQLLDILHQWDLLDKGGSGHHHHHH

SEQ ID NO: 1575 - DNA, 633 bp, synthetic construct
  misc_feature 1..633: note = Variant of 3'O-kinase
  source 1..633: mol_type = other DNA
atggcggttaccattggtttaacaggagggatcgcagcgggcaaatcgactgtgagtgccatgatgcgtgaactgggtctgccggtcatcgatgctgacgaggcagcacgcgccgttatgaagccaggcgaagaagcgtatcgcgacattgtagctgaattcgggccgggcatccttcgtcatgatggcgagatcgatcgccagaaactgggtgctatccgcttttcggacgaacaacaacgtaaggtgctgaattcgattgtaggtcctgcagtcctgaagaagatgctcgcggagtgggaagctcatatcgggtcaggcgccaagacggttgtgctggatatcccgctgctgttcgaatccggattgcaatcgtggatggacaaagttctcgtggtgtacgtcgatgatgatgttcagttacgccgccttatggcacgtaacgggtttactgaagaagaagctctgaagcgcattcgttcacagtggcccagtgcggagaaagttaaacgtgcagacgctgtcatcgacaataatggcaatattgaagaaacccgccgccagctgctggacattttacaccagtgggatctgctggacaaaggtggctccggccaccatcatcaccatcac

SEQ ID NO: 1576 - protein, 211 aa, synthetic construct
  REGION 1..211: note = Variant of 3'O-kinase
MAVTIGLTGGIAAGKSTVSAMMRELGLPVIDADEAARAVMKPGEEAYRDIVAEFGPGILRHDGEIDRQKLGAIRFSDEQQRKVLNSIVGPAVLKKMLAEWEAHIGSGAKTVVLDIPLLFESGLQSWMDKVLVVYVDDDVQLRRLMARNGFTEEEALKRIRSQWPSAEKVKRADAVIDNNGNIEETRRQLLDILHQWDLLDKGGSGHHHHHH

SEQ ID NO: 1577 - DNA, 633 bp, synthetic construct
  misc_feature 1..633: note = Variant of 3'O-kinase
  source 1..633: mol_type = other DNA
atggcggttaccattggtttaacaggagggatcgcagcgggcaaatcgactgtgagtgccatgatgcgtgaactgggtctgccggtcatcgatgctgacgaggcagcacgcgccgttatgaagccaggcgaagaagcgtatcgcgacattgtagctgaattcgggccgggcatccttcgtgcggatggcgagatcgatcgccagaaactgggtgctatccgcttttcggacgaacaacaacgtaaggtgctgaattcgattgtaggtcctgcagtcctgaagaagatgctcgcggagtgggaagctcatatcgggtcaggcgccaagacggttgtgctggatatcccgctgctgttcgaatccggattgcaatcgtggatggacaaagttctcgtggtgtacgtcgatgatgatgttcagttacgccgccttatggcacgtaacgggtttactcttgaagaagctctgaagcgcattcgttcacagtggcccagtgcggagaaagttaaacgtgcagacgctgtcatcgacaataatggcaatattgaagaaacccgccgccagctgctggacattttacaccagtgggatctgctggacaaaggtggctccggccaccatcatcaccatcac

SEQ ID NO: 1578 - protein, 211 aa, synthetic construct
  REGION 1..211: note = Variant of 3'O-kinase
MAVTIGLTGGIAAGKSTVSAMMRELGLPVIDADEAARAVMKPGEEAYRDIVAEFGPGILRADGEIDRQKLGAIRFSDEQQRKVLNSIVGPAVLKKMLAEWEAHIGSGAKTVVLDIPLLFESGLQSWMDKVLVVYVDDDVQLRRLMARNGFTLEEALKRIRSQWPSAEKVKRADAVIDNNGNIEETRRQLLDILHQWDLLDKGGSGHHHHHH

SEQ ID NO: 1579 - DNA, 633 bp, synthetic construct
  misc_feature 1..633: note = Variant of 3'O-kinase
  source 1..633: mol_type = other DNA
atggcggttaccattggtttaacaggagggatcgcagcgggcaaatcgactgtgagtgccatgatgcgtgaactgggtctgccggtcatcgatgctgacgaggcagcacgcgccgttatgaagccaggcgaagaagcgtatcgcgacattgtagctgaattcgggccgggcatccttcgtgcggatggcgagatcgatcgccagaaactgggtgctatccgcttttcggacgaacaacaacgtaaggtgctgaattcgattgtaggtcctgcagtcctgaagaagatgctcgcggagtgggaagctcatatcgggtcaggcgccgatacggttgtgctggatatcccgctgctgttcgaatccggattgcaatcgtggatggacaaagttctcgtggtgtacgtcgatgatgatgttcagttacgccgccttatggcacgtaacgggtttactgaagaagaagctctgaagcgcattcgttcacagtggcccagtgcggagaaagttaaacgtgcagacgctgtcatcgacaataatggcaatattgaagaaacccgccgccagctgctggacattttacaccagtgggatctgctggacaaaggtggctccggccaccatcatcaccatcac

SEQ ID NO: 1580 - protein, 211 aa, synthetic construct
  REGION 1..211: note = Variant of 3'O-kinase
MAVTIGLTGGIAAGKSTVSAMMRELGLPVIDADEAARAVMKPGEEAYRDIVAEFGPGILRADGEIDRQKLGAIRFSDEQQRKVLNSIVGPAVLKKMLAEWEAHIGSGADTVVLDIPLLFESGLQSWMDKVLVVYVDDDVQLRRLMARNGFTEEEALKRIRSQWPSAEKVKRADAVIDNNGNIEETRRQLLDILHQWDLLDKGGSGHHHHHH

SEQ ID NO: 1581 - DNA, 633 bp, synthetic construct
  misc_feature 1..633: note = Variant of 3'O-kinase
  source 1..633: mol_type = other DNA
atggcggttaccattggtttaacaggagggatcgcagcgggcaaatcgactgtgagtgccatgatgcgtgaactgggtctgccggtcatcgatgctgacgaggcagcacgcgccgttatgaagccaggcgaagaagcgtatcgcgacattgtagctgaattcgggccgggcatccttcgtgcggatggcgagatcgatcgccagaaactgggtgctatccgcttttcggacgaacaacaacgtaaggtgctgaattcgattgtaggtcctgcagtcctgaagaagatgctcgcggagtgggaagctcatatcgggtcaggcgccaagacggttgtgctggatatcccgctgctgttcgaatccggattgcaatcgtggatggacaaagttctcgtggtgtacgtcgatgatgatcagcagttacgccgccttatggcacgtaacgggtttactgaagaagaagctctgaagcgcattcgttcacagtggcccagtgcggagaaagttaaacgtgcagacgctgtcatcgacaataatggcaatattgaagaaacccgccgccagctgctggacattttacaccagtgggatctgctggacaaaggtggctccggccaccatcatcaccatcac

SEQ ID NO: 1582 - protein, 211 aa, synthetic construct
  REGION 1..211: note = Variant of 3'O-kinase
MAVTIGLTGGIAAGKSTVSAMMRELGLPVIDADEAARAVMKPGEEAYRDIVAEFGPGILRADGEIDRQKLGAIRFSDEQQRKVLNSIVGPAVLKKMLAEWEAHIGSGAKTVVLDIPLLFESGLQSWMDKVLVVYVDDDQQLRRLMARNGFTEEEALKRIRSQWPSAEKVKRADAVIDNNGNIEETRRQLLDILHQWDLLDKGGSGHHHHHH

SEQ ID NO: 1583 - DNA, 633 bp, synthetic construct
  misc_feature 1..633: note = Variant of 3'O-kinase
  source 1..633: mol_type = other DNA
atggcggttaccattggtttaacaggagggatcgcagcgggcaaatcgactgtgagtgccatgatgcgtgaactgggtctgccggtcatcgatgctgacgaggcagcacgcgccgttatgaagccaggcgaagaagcgtatcgcgacattgtagctgaattcgggccgggcatccttcgtgcggatggcgagatcgatcgccagaaactgggtgctatccgctttacggacgaacaacaacgtaaggtgctgaattcgattgtaggtcctgcagtcctgaagaagatgctcgcggagtgggaagctcatatcgggtcaggcgccaagacggttgtgctggatatcccgctgctgttcgaatccggattgcaatcgtggatggacaaagttctcgtggtgtacgtcgatgatgatgttcagttacgccgccttatggcacgtaacgggtttactgaagaagaagctctgaagcgcattcgttcacagtggcccagtgcggagaaagttaaacgtgcagacgctgtcatcgacaataatggcaatattgaagaaacccgccgccagctgctggacattttacaccagtgggatctgctggacaaaggtggctccggccaccatcatcaccatcac

SEQ ID NO: 1584 - protein, 211 aa, synthetic construct
  REGION 1..211: note = Variant of 3'O-kinase
MAVTIGLTGGIAAGKSTVSAMMRELGLPVIDADEAARAVMKPGEEAYRDIVAEFGPGILRADGEIDRQKLGAIRFTDEQQRKVLNSIVGPAVLKKMLAEWEAHIGSGAKTVVLDIPLLFESGLQSWMDKVLVVYVDDDVQLRRLMARNGFTEEEALKRIRSQWPSAEKVKRADAVIDNNGNIEETRRQLLDILHQWDLLDKGGSGHHHHHH

SEQ ID NO: 1585 - DNA, 633 bp, synthetic construct
  misc_feature 1..633: note = Variant of 3'O-kinase
  source 1..633: mol_type = other DNA
atggcggttaccattggtttaacaggagggatcgcagcgggcaaatcgactgtgagtgccatgatgcgtgaactgggtctgccggtcatcgatgctgacgaggcagcacgcgccgttatgaagccaggcgaagaagcgtatcgcgacattgtagctgaattcgggccgggcatccttcgtgcggatggcgagatcgatcgccagaaactgggtgctatccgcttttcggacgaacaacaacgtaaggtgctgaattcgattgtaggtcctgcagtcctgaagaagatgggggcggagtgggaagctcatatcgggtcaggcgccaagacggttgtgctggatatcccgctgctgttcgaatccggattgcaatcgtggatggacaaagttctcgtggtgtacgtcgatgatgatgttcagttacgccgccttatggcacgtaacgggtttactgaagaagaagctctgaagcgcattcgttcacagtggcccagtgcggagaaagttaaacgtgcagacgctgtcatcgacaataatggcaatattgaagaaacccgccgccagctgctggacattttacaccagtgggatctgctggacaaaggtggctccggccaccatcatcaccatcac

SEQ ID NO: 1586 - protein, 211 aa, synthetic construct
  REGION 1..211: note = Variant of 3'O-kinase
MAVTIGLTGGIAAGKSTVSAMMRELGLPVIDADEAARAVMKPGEEAYRDIVAEFGPGILRADGEIDRQKLGAIRFSDEQQRKVLNSIVGPAVLKKMGAEWEAHIGSGAKTVVLDIPLLFESGLQSWMDKVLVVYVDDDVQLRRLMARNGFTEEEALKRIRSQWPSAEKVKRADAVIDNNGNIEETRRQLLDILHQWDLLDKGGSGHHHHHH

SEQ ID NO: 1587 - DNA, 633 bp, synthetic construct
  misc_feature 1..633: note = Variant of 3'O-kinase
  source 1..633: mol_type = other DNA
atggcggttaccattggtttaacaggagggatcgcagcgggcaaatcgactgtgagtgccatgatgcgtgaactgggtctgccggtcatcgatgctgacgaggcagcacgcgccgttatgaagccaggcgaagaagcgtatcgcgacattgtagctgaattcgggccgggcatccttcgtgcggatggcgagatcgatcgccagaaactgggtgctatccgcttttcggacgaacaacaacgtaaggtgctgaattcgattgtaggtcctgcagcgctgaagaagatgctcgcggagtgggaagctcatatcgggtcaggcgccaagacggttgtgctggatatcccgctgctgttcgaatccggattgcaatcgtggatggacaaagttctcgtggtgtacgtcgatgatgatgttcagttacgccgccttatggcacgtaacgggtttactgaagaagaagctctgaagcgcattcgttcacagtggcccagtgcggagaaagttaaacgtgcagacgctgtcatcgacaataatggcaatattgaagaaacccgccgccagctgctggacattttacaccagtgggatctgctggacaaaggtggctccggccaccatcatcaccatcac

SEQ ID NO: 1588 - protein, 211 aa, synthetic construct
  REGION 1..211: note = Variant of 3'O-kinase
MAVTIGLTGGIAAGKSTVSAMMRELGLPVIDADEAARAVMKPGEEAYRDIVAEFGPGILRADGEIDRQKLGAIRFSDEQQRKVLNSIVGPAALKKMLAEWEAHIGSGAKTVVLDIPLLFESGLQSWMDKVLVVYVDDDVQLRRLMARNGFTEEEALKRIRSQWPSAEKVKRADAVIDNNGNIEETRRQLLDILHQWDLLDKGGSGHHHHHH

SEQ ID NO: 1589 - DNA, 633 bp, synthetic construct
  misc_feature 1..633: note = Variant of 3'O-kinase
  source 1..633: mol_type = other DNA
atggcggttaccattggtttaacaggagggatcgcagcgggcaaatcgactgtgagtgccatgatgcgtgaactgggtctgccggtcatcgatgctgacgaggcagcacgcgccgttatgaagccaggcgaagaagcgtatcgcgacattgtagctgaattcgggccgggcatccttcgtgcggatggcgagatcgatcgccagaaactgggtgctatccgcttttcggacgaacaacaacgtaaggtgctgaattcgattgtaggtcctgcagtcctgaagaagatgctcgcggagagggaagctcatatcgggtcaggcgccaagacggttgtgctggatatcccgctgctgttcgaatccggattgcaatcgtggatggacaaagttctcgtggtgtacgtcgatgatgatgttcagttacgccgccttatggcacgtaacgggtttactgaagaagaagctctgaagcgcattcgttcacagtggcccagtgcggagaaagttaaacgtgcagacgctgtcatcgacaataatggcaatattgaagaaacccgccgccagctgctggacattttacaccagtgggatctgctggacaaaggtggctccggccaccatcatcaccatcac

SEQ ID NO: 1590 - protein, 211 aa, synthetic construct
  REGION 1..211: note = Variant of 3'O-kinase
MAVTIGLTGGIAAGKSTVSAMMRELGLPVIDADEAARAVMKPGEEAYRDIVAEFGPGILRADGEIDRQKLGAIRFSDEQQRKVLNSIVGPAVLKKMLAEREAHIGSGAKTVVLDIPLLFESGLQSWMDKVLVVYVDDDVQLRRLMARNGFTEEEALKRIRSQWPSAEKVKRADAVIDNNGNIEETRRQLLDILHQWDLLDKGGSGHHHHHH

SEQ ID NO: 1591 - DNA, 633 bp, synthetic construct
  misc_feature 1..633: note = Variant of 3'O-kinase
  source 1..633: mol_type = other DNA
atggcggttaccattggtttaacaggagggatcgcagcgggcaaatcgactgtgagtgccatgatgcgtgaactgggtctgccggtcatcgatgctgacgaggcagggcgcgccgttatgaagccaggcgaagaagcgtatcgcgacattgtagctgaattcgggccgggcatccttcgtgcggatggcgagatcgatcgccagaaactgggtgctatccgcttttcggacgaacaacaacgtaaggtgctgaattcgattgtaggtcctgcagtcctgaagaagatgctcgcggagtgggaagctcatatcgggtcaggcgccaagacggttgtgctggatatcccgctgctgttcgaatccggattgcaatcgtggatggacaaagttctcgtggtgtacgtcgatgatgatgttcagttacgccgccttatggcacgtaacgggtttactgaagaagaagctctgaagcgcattcgttcacagtggcccagtgcggagaaagttaaacgtgcagacgctgtcatcgacaataatggcaatattgaagaaacccgccgccagctgctggacattttacaccagtgggatctgctggacaaaggtggctccggccaccatcatcaccatcac

SEQ ID NO: 1592 - protein, 211 aa, synthetic construct
  REGION 1..211: note = Variant of 3'O-kinase
MAVTIGLTGGIAAGKSTVSAMMRELGLPVIDADEAGRAVMKPGEEAYRDIVAEFGPGILRADGEIDRQKLGAIRFSDEQQRKVLNSIVGPAVLKKMLAEWEAHIGSGAKTVVLDIPLLFESGLQSWMDKVLVVYVDDDVQLRRLMARNGFTEEEALKRIRSQWPSAEKVKRADAVIDNNGNIEETRRQLLDILHQWDLLDKGGSGHHHHHH

SEQ ID NO: 1593 - DNA, 633 bp, synthetic construct
  misc_feature 1..633: note = Variant of 3'O-kinase
  source 1..633: mol_type = other DNA
atggcggttaccattggtttaacaggagggatcgcagcgggcaaatcgactgtgagtgccatgatgcgtgaactgggtctgccggtcatcgatgctgacgaggcagcacgcgccgttatgaagccaggcgaagaagcgtatcgcgacattgtactggaattcgggccgggcatccttcgtgcggatggcgagatcgatcgccagaaactgggtgctatccgcttttcggacgaacaacaacgtaaggtgctgaattcgattgtaggtcctgcagtcctgaagaagatgctcgcggagtgggaagctcatatcgggtcaggcgccaagacggttgtgctggatatcccgctgctgttcgaatccggattgcaatcgtggatggacaaagttctcgtggtgtacgtcgatgatgatgttcagttacgccgccttatggcacgtaacgggtttactgaagaagaagctctgaagcgcattcgttcacagtggcccagtgcggagaaagttaaacgtgcagacgctgtcatcgacaataatggcaatattgaagaaacccgccgccagctgctggacattttacaccagtgggatctgctggacaaaggtggctccggccaccatcatcaccatcac

SEQ ID NO: 1594 - protein, 211 aa, synthetic construct
  REGION 1..211: note = Variant of 3'O-kinase
MAVTIGLTGGIAAGKSTVSAMMRELGLPVIDADEAARAVMKPGEEAYRDIVLEFGPGILRADGEIDRQKLGAIRFSDEQQRKVLNSIVGPAVLKKMLAEWEAHIGSGAKTVVLDIPLLFESGLQSWMDKVLVVYVDDDVQLRRLMARNGFTEEEALKRIRSQWPSAEKVKRADAVIDNNGNIEETRRQLLDILHQWDLLDKGGSGHHHHHH

SEQ ID NO: 1595 - DNA, 633 bp, synthetic construct
  misc_feature 1..633: note = Variant of 3'O-kinase
  source 1..633: mol_type = other DNA
atggcggttaccattggtttaacaggagggatcgcagcgggcaaatcgactgtgagtgccatgatgcgtgaactgggtctgccggtcatcgatgctgacgaggcagcacgcgccgttatgaagccaggcgaagaagcgtatcgcgacattgtaacggaattcgggccgggcatccttcgtgcggatggcgagatcgatcgccagaaactgggtgctatccgcttttcggacgaacaacaacgtaaggtgctgaattcgattgtaggtcctgcagtcctgaagaagatgctcgcggagtgggaagctcatatcgggtcaggcgccaagacggttgtgctggatatcccgctgctgttcgaatccggattgcaatcgtggatggacaaagttctcgtggtgtacgtcgatgatgatgttcagttacgccgccttatggcacgtaacgggtttactgaagaagaagctctgaagcgcattcgttcacagtggcccagtgcggagaaagttaaacgtgcagacgctgtcatcgacaataatggcaatattgaagaaacccgccgccagctgctggacattttacaccagtgggatctgctggacaaaggtggctccggccaccatcatcaccatcac

SEQ ID NO: 1596 - protein, 211 aa, synthetic construct
  REGION 1..211: note = Variant of 3'O-kinase
MAVTIGLTGGIAAGKSTVSAMMRELGLPVIDADEAARAVMKPGEEAYRDIVTEFGPGILRADGEIDRQKLGAIRFSDEQQRKVLNSIVGPAVLKKMLAEWEAHIGSGAKTVVLDIPLLFESGLQSWMDKVLVVYVDDDVQLRRLMARNGFTEEEALKRIRSQWPSAEKVKRADAVIDNNGNIEETRRQLLDILHQWDLLDKGGSGHHHHHH

SEQ ID NO: 1597 - DNA, 633 bp, synthetic construct
  misc_feature 1..633: note = Variant of 3'O-kinase
  source 1..633: mol_type = other DNA
atggcggttaccattggtttaacaggagggatcgcagttggcaaatcgactgtgagtgccatgatgcgtgaactgggtctgccggtcatcgatgctgacgaggcagcacgcgccgttatgaagccaggcgaagaagcgtatcgcgacattgtagctgaattcgggccgggcatccttcgtgcggatggcgagatcgatcgccagaaactgggtgctatccgcttttcggacgaacaacaacgtaaggtgctgaattcgattgtaggtcctgcagtcctgaagaagatgctcgcggagtgggaagctcatatcgggtcaggcgccaagacggttgtgctggatatcccgctgctgttcgaatccggattgcaatcgtggatggacaaagttctcgtggtgtacgtcgatgatgatgttcagttacgccgccttatggcacgtaacgggtttactgaagaagaagctctgaagcgcattcgttcacagtggcccagtgcggagaaagttaaacgtgcagacgctgtcatcgacaataatggcaatattgaagaaacccgccgccagctgctggacattttacaccagtgggatctgctggacaaaggtggctccggccaccatcatcaccatcac

SEQ ID NO: 1598 - protein, 211 aa, synthetic construct
  REGION 1..211: note = Variant of 3'O-kinase
MAVTIGLTGGIAVGKSTVSAMMRELGLPVIDADEAARAVMKPGEEAYRDIVAEFGPGILRADGEIDRQKLGAIRFSDEQQRKVLNSIVGPAVLKKMLAEWEAHIGSGAKTVVLDIPLLFESGLQSWMDKVLVVYVDDDVQLRRLMARNGFTEEEALKRIRSQWPSAEKVKRADAVIDNNGNIEETRRQLLDILHQWDLLDKGGSGHHHHHH

SEQ ID NO: 1599 - DNA, 633 bp, synthetic construct
  misc_feature 1..633: note = Variant of 3'O-kinase
  source 1..633: mol_type = other DNA
atggcgagtaccattggtttaacaggagggatcgcagcgggcaaatcgactgtgagtgccatgatgcgtgaactgggtctgccggtcatcgatgctgacgaggcagcacgcgccgttatgaagccaggcgaagaagcgtatcgcgacattgtagctgaattcgggccgggcatccttcgtgcggatggcgagatcgatcgccagaaactgggtgctatccgcttttcggacgaacaacaacgtaaggtgctgaattcgattgtaggtcctgcagtcctgaagaagatgctcgcggagtgggaagctcatatcgggtcaggcgccaagacggttgtgctggatatcccgctgctgttcgaatccggattgcaatcgtggatggacaaagttctcgtggtgtacgtcgatgatgatgttcagttacgccgccttatggcacgtaacgggtttactgaagaagaagctctgaagcgcattcgttcacagtggcccagtgcggagaaagttaaacgtgcagacgctgtcatcgacaataatggcaatattgaagaaacccgccgccagctgctggacattttacaccagtgggatctgctggacaaaggtggctccggccaccatcatcaccatcac

SEQ ID NO: 1600 - protein, 211 aa, synthetic construct
  REGION 1..211: note = Variant of 3'O-kinase
MASTIGLTGGIAAGKSTVSAMMRELGLPVIDADEAARAVMKPGEEAYRDIVAEFGPGILRADGEIDRQKLGAIRFSDEQQRKVLNSIVGPAVLKKMLAEWEAHIGSGAKTVVLDIPLLFESGLQSWMDKVLVVYVDDDVQLRRLMARNGFTEEEALKRIRSQWPSAEKVKRADAVIDNNGNIEETRRQLLDILHQWDLLDKGGSGHHHHHH

SEQ ID NO: 1601 - DNA, 633 bp, synthetic construct
  misc_feature 1..633: note = Variant of 3'O-kinase
  source 1..633: mol_type = other DNA
atggcggttaccattggtttaacaggagggatcgcagcgggcaaatcgactgtgagtgccatgatgcgtgaactgggtctgccggtcatcgatgctgacgaggcagcacgcgccgttatgaagccaggcgaagaagcgtatcgcgacattgtagctgaattcgggccgggcatccttcgtgcggatggcgagatcgatcgccagaaactgggtgctatccgcttttcggacgaacaacaacgtaaggtgctgaattcgattgtaggtcctgcagtcctgaagaagatgctcgcggagtgggaagctcatatcgggtcaggcgcctcgacggttgtgctggatatcccgctgctgttcgaatccggattgcaatcgtggatggacaaagttctcgtggtgtacgtcgatgatgatgttcagttacgccgccttatggcacgtaacgggtttactgaagaagaagctctgaagcgcattcgttcacagtggcccagtgcggagaaagttaaacgtgcagacgctgtcatcgacaataatggcaatattgaagaaacccgccgccagctgctggacattttacaccagtgggatctgctggacaaaggtggctccggccaccatcatcaccatcac

SEQ ID NO: 1602 - protein, 211 aa, synthetic construct
  REGION 1..211: note = Variant of 3'O-kinase
MAVTIGLTGGIAAGKSTVSAMMRELGLPVIDADEAARAVMKPGEEAYRDIVAEFGPGILRADGEIDRQKLGAIRFSDEQQRKVLNSIVGPAVLKKMLAEWEAHIGSGASTVVLDIPLLFESGLQSWMDKVLVVYVDDDVQLRRLMARNGFTEEEALKRIRSQWPSAEKVKRADAVIDNNGNIEETRRQLLDILHQWDLLDKGGSGHHHHHH

SEQ ID NO: 1603 - DNA, 633 bp, synthetic construct
  misc_feature 1..633: note = Variant of 3'O-kinase
  source 1..633: mol_type = other DNA
atggcggttaccattggtttaacaggagggatcgcagcgggcaaatcgactgtgagtgccatgatgcgtgaactgggtctgccggtcatcgatgctgacgaggcagcacgcgccgttatgaagccaggcgaagaagcgtatcgcgacattgtagctgaattcgggccgggcatccttcgtgcggatggcgagatcgatcgccagaaactgggtgctatccgcttttcggacgaacaacaatggaaggtgctgaattcgattgtaggtcctgcagtcctgaagaagatgctcgcggagtgggaagctcatatcgggtcaggcgccaagacggttgtgctggatatcccgctgctgttcgaatccggattgcaatcgtggatggacaaagttctcgtggtgtacgtcgatgatgatgttcagttacgccgccttatggcacgtaacgggtttactgaagaagaagctctgaagcgcattcgttcacagtggcccagtgcggagaaagttaaacgtgcagacgctgtcatcgacaataatggcaatattgaagaaacccgccgccagctgctggacattttacaccagtgggatctgctggacaaaggtggctccggccaccatcatcaccatcac

SEQ ID NO: 1604 - protein, 211 aa, synthetic construct
  REGION 1..211: note = Variant of 3'O-kinase
MAVTIGLTGGIAAGKSTVSAMMRELGLPVIDADEAARAVMKPGEEAYRDIVAEFGPGILRADGEIDRQKLGAIRFSDEQQWKVLNSIVGPAVLKKMLAEWEAHIGSGAKTVVLDIPLLFESGLQSWMDKVLVVYVDDDVQLRRLMARNGFTEEEALKRIRSQWPSAEKVKRADAVIDNNGNIEETRRQLLDILHQWDLLDKGGSGHHHHHH

SEQ ID NO: 1605 - DNA, 633 bp, synthetic construct
  misc_feature 1..633: note = Variant of 3'O-kinase
  source 1..633: mol_type = other DNA
atggcggttaccattggtttaacaggagggatcgcagcgggcaaatcgactgtgagtgccatgatgcgtgaactgggtctgccggtcatcgatgctgacgaggcagcacgcgccgttatgaagccaggcgaagaagcgtatcgcgacattgtagctgaattcgggccgggcatccttcgtgcggatggcgagatcgatcgccagaaactgggtgctatccgcttttcggacgaacaacaacgtaaggtgctgaattcgattgtaggtcctgcagtcctgaagaagatgctcgcggagtgggaagctcatatcgggtcaggcgccaagacggttgtgctggatatcccgctgctgttcgaatccggattgcaatcgtggatggacaaagttctcgtggtgtacgtcgatgatgatgttcagttacgccgccttatggcacgtaacgggtttactgaagaagaagctctgaagcgcattcgttcacagtggcccagtgcggagaaagttaaacgtgcagacgctgtcatcgacaataatggcaatattgaagaaacccgccgccagctgctggacattttacaccagtgggctctgctggacaaaggtggctccggccaccatcatcaccatcac

SEQ ID NO: 1606 - protein, 211 aa, synthetic construct
  REGION 1..211: note = Variant of 3'O-kinase
MAVTIGLTGGIAAGKSTVSAMMRELGLPVIDADEAARAVMKPGEEAYRDIVAEFGPGILRADGEIDRQKLGAIRFSDEQQRKVLNSIVGPAVLKKMLAEWEAHIGSGAKTVVLDIPLLFESGLQSWMDKVLVVYVDDDVQLRRLMARNGFTEEEALKRIRSQWPSAEKVKRADAVIDNNGNIEETRRQLLDILHQWALLDKGGSGHHHHHH

SEQ ID NO: 1607 - DNA, 633 bp, synthetic construct
  misc_feature 1..633: note = Variant of 3'O-kinase
  source 1..633: mol_type = other DNA
atggcggttaccattggtttaacaggagggatcgcagcgggcaaatcgactgtgagtgccatgatgcgtgaactgggtctgccggtcatcgatgctgacgaggcagcacgcgccgttatgaagccaggcgaagaagcgtatcgcgacattgtagctgaattcgggccgggcatccttcgtgcggatggcgagatcgatcgccagaaactgggtgctatccgcttttcggacgaacaacaacgtaaggtgctgaattcgattgtaggtagggcagtcctgaagaagatgctcgcggagtgggaagctcatatcgggtcaggcgccaagacggttgtgctggatatcccgctgctgttcgaatccggattgcaatcgtggatggacaaagttctcgtggtgtacgtcgatgatgatgttcagttacgccgccttatggcacgtaacgggtttactgaagaagaagctctgaagcgcattcgttcacagtggcccagtgcggagaaagttaaacgtgcagacgctgtcatcgacaataatggcaatattgaagaaacccgccgccagctgctggacattttacaccagtgggatctgctggacaaaggtggctccggccaccatcatcaccatcac

SEQ ID NO: 1608 - protein, 211 aa, synthetic construct
  REGION 1..211: note = Variant of 3'O-kinase
MAVTIGLTGGIAAGKSTVSAMMRELGLPVIDADEAARAVMKPGEEAYRDIVAEFGPGILRADGEIDRQKLGAIRFSDEQQRKVLNSIVGRAVLKKMLAEWEAHIGSGAKTVVLDIPLLFESGLQSWMDKVLVVYVDDDVQLRRLMARNGFTEEEALKRIRSQWPSAEKVKRADAVIDNNGNIEETRRQLLDILHQWDLLDKGGSGHHHHHH

SEQ ID NO: 1609 - DNA, 633 bp, synthetic construct
  misc_feature 1..633: note = Variant of 3'O-kinase
  source 1..633: mol_type = other DNA
atgcaggttaccattggtttaacaggagggatcgcagcgggcaaatcgactgtgagtgccatgatgcgtgaactgggtctgccggtcatcgatgctgacgaggcagcacgcgccgttatgaagccaggcgaagaagcgtatcgcgacattgtagctgaattcgggccgggcatccttcgtgcggatggcgagatcgatcgccagaaactgggtgctatccgcttttcggacgaacaacaacgtaaggtgctgaattcgattgtaggtcctgcagtcctgaagaagatgctcgcggagtgggaagctcatatcgggtcaggcgccaagacggttgtgctggatatcccgctgctgttcgaatccggattgcaatcgtggatggacaaagttctcgtggtgtacgtcgatgatgatgttcagttacgccgccttatggcacgtaacgggtttactgaagaagaagctctgaagcgcattcgttcacagtggcccagtgcggagaaagttaaacgtgcagacgctgtcatcgacaataatggcaatattgaagaaacccgccgccagctgctggacattttacaccagtgggatctgctggacaaaggtggctccggccaccatcatcaccatcac

SEQ ID NO: 1610 - protein, 211 aa, synthetic construct
  REGION 1..211: note = Variant of 3'O-kinase
MQVTIGLTGGIAAGKSTVSAMMRELGLPVIDADEAARAVMKPGEEAYRDIVAEFGPGILRADGEIDRQKLGAIRFSDEQQRKVLNSIVGPAVLKKMLAEWEAHIGSGAKTVVLDIPLLFESGLQSWMDKVLVVYVDDDVQLRRLMARNGFTEEEALKRIRSQWPSAEKVKRADAVIDNNGNIEETRRQLLDILHQWDLLDKGGSGHHHHHH

SEQ ID NO: 1611 - DNA, 633 bp, synthetic construct
  misc_feature 1..633: note = Variant of 3'O-kinase
  source 1..633: mol_type = other DNA
atggcggttaccattggtttaacaggagggatcgcagcgggcaaatcgactgtgagtgccatgatgcgtgaactgggtctgccggtcatcgatgctgacgaggcagcacgcgccgttatgaagccaggcgaagaagcgtatcgcgacattgtagctgaattcgggccgggcatccttcgtgcggatggcgagatcgatcgccagaaactgggtgctatccgcttttcggacgaacaacaacgtaagctgctgaattcgattgtaggtcctgcagtcctgaagaagatgctcgcggagtgggaagctcatatcgggtcaggcgccaagacggttgtgctggatatcccgctgctgttcgaatccggattgcaatcgtggatggacaaagttctcgtggtgtacgtcgatgatgatgttcagttacgccgccttatggcacgtaacgggtttactgaagaagaagctctgaagcgcattcgttcacagtggcccagtgcggagaaagttaaacgtgcagacgctgtcatcgacaataatggcaatattgaagaaacccgccgccagctgctggacattttacaccagtgggatctgctggacaaaggtggctccggccaccatcatcaccatcac

SEQ ID NO: 1612 - protein, 211 aa, synthetic construct
  REGION 1..211: note = Variant of 3'O-kinase
MAVTIGLTGGIAAGKSTVSAMMRELGLPVIDADEAARAVMKPGEEAYRDIVAEFGPGILRADGEIDRQKLGAIRFSDEQQRKLLNSIVGPAVLKKMLAEWEAHIGSGAKTVVLDIPLLFESGLQSWMDKVLVVYVDDDVQLRRLMARNGFTEEEALKRIRSQWPSAEKVKRADAVIDNNGNIEETRRQLLDILHQWDLLDKGGSGHHHHHH

SEQ ID NO: 1613 - DNA, 633 bp, synthetic construct
  misc_feature 1..633: note = Variant of 3'O-kinase
  source 1..633: mol_type = other DNA
atggcggttaccattggtttaacaggagggatcgcagcgggcaaatcgactgtgagtgccatgatgcgtgaactgggtctgccggtcatcgatgctgacgaggcagcacgcgccgttatgaagccaggcgaagaagcgtatcgcgacattgtagctgaaatggggccgggcatccttcgtgcggatggcgagatcgatcgccagaaactgggtgctatccgcttttcggacgaacaacaacgtaaggtgctgaattcgattgtaggtcctgcagtcctgaagaagatgctcgcggagtgggaagctcatatcgggtcaggcgccaagacggttgtgctggatatcccgctgctgttcgaatccggattgcaatcgtggatggacaaagttctcgtggtgtacgtcgatgatgatgttcagttacgccgccttatggcacgtaacgggtttactgaagaagaagctctgaagcgcattcgttcacagtggcccagtgcggagaaagttaaacgtgcagacgctgtcatcgacaataatggcaatattgaagaaacccgccgccagctgctggacattttacaccagtgggatctgctggacaaaggtggctccggccaccatcatcaccatcac

SEQ ID NO: 1614 - protein, 211 aa, synthetic construct
  REGION 1..211: note = Variant of 3'O-kinase
MAVTIGLTGGIAAGKSTVSAMMRELGLPVIDADEAARAVMKPGEEAYRDIVAEMGPGILRADGEIDRQKLGAIRFSDEQQRKVLNSIVGPAVLKKMLAEWEAHIGSGAKTVVLDIPLLFESGLQSWMDKVLVVYVDDDVQLRRLMARNGFTEEEALKRIRSQWPSAEKVKRADAVIDNNGNIEETRRQLLDILHQWDLLDKGGSGHHHHHH

SEQ ID NO: 1615 - DNA, 633 bp, synthetic construct
  misc_feature 1..633: note = Variant of 3'O-kinase
  source 1..633: mol_type = other DNA
atggcggttaccattggtttaacaggagggatcgcagcgggcaaatcgactgtgagtgccatgatgcgtgaactgggtctgccggtcatcgatgctgacgaggcagcacgcgccgttatgaagccagaggaagaagcgtatcgcgacattgtagctgaattcgggccgggcatccttcgtgcggatggcgagatcgatcgccagaaactgggtgctatccgcttttcggacgaacaacaacgtaaggtgctgaattcgattgtaggtcctgcagtcctgaagaagatgctcgcggagtgggaagctcatatcgggtcaggcgccaagacggttgtgctggatatcccgctgctgttcgaatccggattgcaatcgtggatggacaaagttctcgtggtgtacgtcgatgatgatgttcagttacgccgccttatggcacgtaacgggtttactgaagaagaagctctgaagcgcattcgttcacagtggcccagtgcggagaaagttaaacgtgcagacgctgtcatcgacaataatggcaatattgaagaaacccgccgccagctgctggacattttacaccagtgggatctgctggacaaaggtggctccggccaccatcatcaccatcac

SEQ ID NO: 1616 - protein, 211 aa, synthetic construct
  REGION 1..211: note = Variant of 3'O-kinase
MAVTIGLTGGIAAGKSTVSAMMRELGLPVIDADEAARAVMKPEEEAYRDIVAEFGPGILRADGEIDRQKLGAIRFSDEQQRKVLNSIVGPAVLKKMLAEWEAHIGSGAKTVVLDIPLLFESGLQSWMDKVLVVYVDDDVQLRRLMARNGFTEEEALKRIRSQWPSAEKVKRADAVIDNNGNIEETRRQLLDILHQWDLLDKGGSGHHHHHH

SEQ ID NO: 1617 - DNA, 633 bp, synthetic construct
  misc_feature 1..633: note = Variant of 3'O-kinase
  source 1..633: mol_type = other DNA
atggcggttaccattggtttaacaggagggatcgcagcgggcaaatcgactgtgagtgccatgatgcgtgaactgggtctgccggtcatcgatgctgacgaggcagcacgcgccgttcgtaagccaggcgaagaagcgtatcgcgacattgtagctgaattcgggccgggcatccttcgtgcggatggcgagatcgatcgccagaaactgggtgctatccgcttttcggacgaacaacaacgtaaggtgctgaattcgattgtaggtcctgcagtcctgaagaagatgctcgcggagtgggaagctcatatcgggtcaggcgccaagacggttgtgctggatatcccgctgctgttcgaatccggattgcaatcgtggatggacaaagttctcgtggtgtacgtcgatgatgatgttcagttacgccgccttatggcacgtaacgggtttactgaagaagaagctctgaagcgcattcgttcacagtggcccagtgcggagaaagttaaacgtgcagacgctgtcatcgacaataatggcaatattgaagaaacccgccgccagctgctggacattttacaccagtgggatctgctggacaaaggtggctccggccaccatcatcaccatcac

SEQ ID NO: 1618 - protein, 211 aa, synthetic construct
  REGION 1..211: note = Variant of 3'O-kinase
MAVTIGLTGGIAAGKSTVSAMMRELGLPVIDADEAARAVRKPGEEAYRDIVAEFGPGILRADGEIDRQKLGAIRFSDEQQRKVLNSIVGPAVLKKMLAEWEAHIGSGAKTVVLDIPLLFESGLQSWMDKVLVVYVDDDVQLRRLMARNGFTEEEALKRIRSQWPSAEKVKRADAVIDNNGNIEETRRQLLDILHQWDLLDKGGSGHHHHHH

SEQ ID NO: 1619 - DNA, 633 bp, synthetic construct
  misc_feature 1..633: note = Variant of 3'O-kinase
  source 1..633: mol_type = other DNA
atggcggttaccattggtttaacaggagggatcgcagcgggcaaatcgactgtgagtgccatgatgcgtgaactgggtctgccggtcatcgatgctgacgaggcagcacgcgccgttatgaagccaggcgaagaagcgtatcgcgacattgtagctgaattcgggccgggcatccttcgtgcggatggcgagatcgatcgccagaaactgggtgctatccgcttttcggacgaacaacaacgtaaggtgctgaattcgattgtaggtcctgcagtcctgaagaagatgctcgcggagtgggaagctcatatcgggtcaggcgccaagacggttgtgctggatatcccgctgctgttcgaatccggattgcaatcgtggatggacaaagttctcgtggtgtacgtcgatgatgatgttcagttacgccgccttatggcacgtaacgggtttactgaagaagaagctctgaagcgcattcgttcacagtggcccagtgcggagaaagttaaacgtgcagcggctgtcatcgacaataatggcaatattgaagaaacccgccgccagctgctggacattttacaccagtgggatctgctggacaaaggtggctccggccaccatcatcaccatcac

SEQ ID NO: 1620 - protein, 211 aa, synthetic construct
  REGION 1..211: note = Variant of 3'O-kinase
MAVTIGLTGGIAAGKSTVSAMMRELGLPVIDADEAARAVMKPGEEAYRDIVAEFGPGILRADGEIDRQKLGAIRFSDEQQRKVLNSIVGPAVLKKMLAEWEAHIGSGAKTVVLDIPLLFESGLQSWMDKVLVVYVDDDVQLRRLMARNGFTEEEALKRIRSQWPSAEKVKRAAAVIDNNGNIEETRRQLLDILHQWDLLDKGGSGHHHHHH

SEQ ID NO: 1621 - DNA, 633 bp, synthetic construct
  misc_feature 1..633: note = Variant of 3'O-kinase
  source 1..633: mol_type = other DNA
atggcggttaccattggtttaacaggagggatcgcagcgggcaaatcgactgtgagtgccatgatgcgtgaactgggtctgccggtcatcgatgctgacgaggcagagcgcgccgttatgaagccaggcgaagaagcgtatcgcgacattgtagctgaattcgggccgggcatccttcgtgcggatggcgagatcgatcgccagaaactgggtgctatccgcttttcggacgaacaacaacgtaaggtgctgaattcgattgtaggtcctgcagtcctgaagaagatgctcgcggagtgggaagctcatatcgggtcaggcgccaagacggttgtgctggatatcccgctgctgttcgaatccggattgcaatcgtggatggacaaagttctcgtggtgtacgtcgatgatgatgttcagttacgccgccttatggcacgtaacgggtttactgaagaagaagctctgaagcgcattcgttcacagtggcccagtgcggagaaagttaaacgtgcagacgctgtcatcgacaataatggcaatattgaagaaacccgccgccagctgctggacattttacaccagtgggatctgctggacaaaggtggctccggccaccatcatcaccatcac

SEQ ID NO: 1622 - protein, 211 aa, synthetic construct
  REGION 1..211: note = Variant of 3'O-kinase
MAVTIGLTGGIAAGKSTVSAMMRELGLPVIDADEAERAVMKPGEEAYRDIVAEFGPGILRADGEIDRQKLGAIRFSDEQQRKVLNSIVGPAVLKKMLAEWEAHIGSGAKTVVLDIPLLFESGLQSWMDKVLVVYVDDDVQLRRLMARNGFTEEEALKRIRSQWPSAEKVKRADAVIDNNGNIEETRRQLLDILHQWDLLDKGGSGHHHHHH

SEQ ID NO: 1623 - DNA, 633 bp, synthetic construct
  misc_feature 1..633: note = Variant of 3'O-kinase
  source 1..633: mol_type = other DNA
atggcggttaccattggtttaacaggagggatcgcagcgggcaaatcgactgtgagtgccatgatgcgtgaactgggtctgccggtcatcgatgctgacgaggcagcacgcgccgttatgaagccaggcgaagaagcgtatcgcgacattgtagctgaattcgggccgggcatccttcgtgcggatggcgagatcgatcgccagaaactgggtgctatccgcttttcggacgaacaacaacgtaaggtgctgcggtcgattgtaggtcctgcagtcctgaagaagatgctcgcggagtgggaagctcatatcgggtcaggcgccaagacggttgtgctggatatcccgctgctgttcgaatccggattgcaatcgtggatggacaaagttctcgtggtgtacgtcgatgatgatgttcagttacgccgccttatggcacgtaacgggtttactgaagaagaagctctgaagcgcattcgttcacagtggcccagtgcggagaaagttaaacgtgcagacgctgtcatcgacaataatggcaatattgaagaaacccgccgccagctgctggacattttacaccagtgggatctgctggacaaaggtggctccggccaccatcatcaccatcac

SEQ ID NO: 1624 - protein, 211 aa, synthetic construct
  REGION 1..211: note = Variant of 3'O-kinase
MAVTIGLTGGIAAGKSTVSAMMRELGLPVIDADEAARAVMKPGEEAYRDIVAEFGPGILRADGEIDRQKLGAIRFSDEQQRKVLRSIVGPAVLKKMLAEWEAHIGSGAKTVVLDIPLLFESGLQSWMDKVLVVYVDDDVQLRRLMARNGFTEEEALKRIRSQWPSAEKVKRADAVIDNNGNIEETRRQLLDILHQWDLLDKGGSGHHHHHH

SEQ ID NO: 1625 - DNA, 633 bp, synthetic construct
  misc_feature 1..633: note = Variant of 3'O-kinase
  source 1..633: mol_type = other DNA
atggcggttaccattggtttaacaggagggatcgcagcgggcaaatcgactgtgagtgccatgatgcgtgaactgggtctgccggtcatcgatgctgacgaggcagcacgcgccgttatgaagccaggcgaagaagcgtatgtggacattgtagctgaattcgggccgggcatccttcgtgcggatggcgagatcgatcgccagaaactgggtgctatccgcttttcggacgaacaacaacgtaaggtgctgaattcgattgtaggtcctgcagtcctgaagaagatgctcgcggagtgggaagctcatatcgggtcaggcgccaagacggttgtgctggatatcccgctgctgttcgaatccggattgcaatcgtggatggacaaagttctcgtggtgtacgtcgatgatgatgttcagttacgccgccttatggcacgtaacgggtttactgaagaagaagctctgaagcgcattcgttcacagtggcccagtgcggagaaagttaaacgtgcagacgctgtcatcgacaataatggcaatattgaagaaacccgccgccagctgctggacattttacaccagtgggatctgctggacaaaggtggctccggccaccatcatcaccatcac

SEQ ID NO: 1626 - protein, 211 aa, synthetic construct
  REGION 1..211: note = Variant of 3'O-kinase
MAVTIGLTGGIAAGKSTVSAMMRELGLPVIDADEAARAVMKPGEEAYVDIVAEFGPGILRADGEIDRQKLGAIRFSDEQQRKVLNSIVGPAVLKKMLAEWEAHIGSGAKTVVLDIPLLFESGLQSWMDKVLVVYVDDDVQLRRLMARNGFTEEEALKRIRSQWPSAEKVKRADAVIDNNGNIEETRRQLLDILHQWDLLDKGGSGHHHHHH

SEQ ID NO: 1627 - DNA, 633 bp, synthetic construct
  misc_feature 1..633: note = Variant of 3'O-kinase
  source 1..633: mol_type = other DNA
atggcggttaccattggtttaacaggagggatcgcagcgggcaaatcgactgtgagtgccatgatgcgtgaactgggtctgccggtcatcgatgctgacgaggcagcacgcgccgttatgaagccaggcgaagaagcgtatcgcgacattgtagctgaattcgggccgggcatccttcgtgcggatggcgagatcgatcgccagaaactgggtgctatccgcttttcggacgaacaacaacgtaaggtgctgaattcgattgtaggtcctgcagtcctgaagaagatgctcgcggagtgggaagctcatatcgggtcaggcgccaagacggttgtgctggatatcccgctgctgttcgaatccggattgcaatcgtggatggacaaagttctcgtggtgtacgtcgatgatgatgttcagttacgccgccttatggcacgtaacgggtttactgaagaagaagctctgaagcgcattcgttcacagtggcccagtgcggagaaagttaaacgtgcaattgctgtcatcgacaataatggcaatattgaagaaacccgccgccagctgctggacattttacaccagtgggatctgctggacaaaggtggctccggccaccatcatcaccatcac

SEQ ID NO: 1628 - protein, 211 aa, synthetic construct
  REGION 1..211: note = Variant of 3'O-kinase
MAVTIGLTGGIAAGKSTVSAMMRELGLPVIDADEAARAVMKPGEEAYRDIVAEFGPGILRADGEIDRQKLGAIRFSDEQQRKVLNSIVGPAVLKKMLAEWEAHIGSGAKTVVLDIPLLFESGLQSWMDKVLVVYVDDDVQLRRLMARNGFTEEEALKRIRSQWPSAEKVKRAIAVIDNNGNIEETRRQLLDILHQWDLLDKGGSGHHHHHH

SEQ ID NO: 1629 - DNA, 633 bp, synthetic construct
  misc_feature 1..633: note = Variant of 3'O-kinase
  source 1..633: mol_type = other DNA
atggcggttaccattggtttaacaggagggatcgcagcgggcaaatcgactgtgagtgccatgatgcgtgaactgggtctgccggtcatcgatgctgacgaggcagcacgcgccgttatgaagccaggcgaagaagcgtatcgcgacattgtagctgggttcgggccgggcatccttcgtgcggatggcgagatcgatcgccagaaactgggtgctatccgcttttcggacgaacaacaacgtaaggtgctgaattcgattgtaggtcctgcagtcctgaagaagatgctcgcggagtgggaagctcatatcgggtcaggcgccaagacggttgtgctggatatcccgctgctgttcgaatccggattgcaatcgtggatggacaaagttctcgtggtgtacgtcgatgatgatgttcagttacgccgccttatggcacgtaacgggtttactgaagaagaagctctgaagcgcattcgttcacagtggcccagtgcggagaaagttaaacgtgcagacgctgtcatcgacaataatggcaatattgaagaaacccgccgccagctgctggacattttacaccagtgggatctgctggacaaaggtggctccggccaccatcatcaccatcac

SEQ ID NO: 1630 - protein, 211 aa, synthetic construct
  REGION 1..211: note = Variant of 3'O-kinase
MAVTIGLTGGIAAGKSTVSAMMRELGLPVIDADEAARAVMKPGEEAYRDIVAGFGPGILRADGEIDRQKLGAIRFSDEQQRKVLNSIVGPAVLKKMLAEWEAHIGSGAKTVVLDIPLLFESGLQSWMDKVLVVYVDDDVQLRRLMARNGFTEEEALKRIRSQWPSAEKVKRADAVIDNNGNIEETRRQLLDILHQWDLLDKGGSGHHHHHH

SEQ ID NO: 1631 - DNA, 633 bp, synthetic construct
  misc_feature 1..633: note = Variant of 3'O-kinase
  source 1..633: mol_type = other DNA
atggcggggaccattggtttaacaggagggatcgcagcgggcaaatcgactgtgagtgccatgatgcgtgaactgggtctgccggtcatcgatgctgacgaggcagcacgcgccgttatgaagccaggcgaagaagcgtatcgcgacattgtagctgaattcgggccgggcatccttcgtgcggatggcgagatcgatcgccagaaactgggtgctatccgcttttcggacgaacaacaacgtaaggtgctgaattcgattgtaggtcctgcagtcctgaagaagatgctcgcggagtgggaagctcatatcgggtcaggcgccaagacggttgtgctggatattccgctgctgttcgaatccggattgcaatcgtggatggacaaagttctcgtggtgtacgtcgatgatgatgttcagttacgccgccttatggcacgtaacgggtttactgaagaagaagctctgaagcgcattcgttcacagtggcccagtgcggagaaagttaaacgtgcagacgctgtcatcgacaataatggcaatattgaagaaacccgccgccagctgctggacattttacaccagtgggatctgctggacaaaggtggctccggccaccatcatcaccatcac

SEQ ID NO: 1632 - protein, 211 aa, synthetic construct
  REGION 1..211: note = Variant of 3'O-kinase
MAGTIGLTGGIAAGKSTVSAMMRELGLPVIDADEAARAVMKPGEEAYRDIVAEFGPGILRADGEIDRQKLGAIRFSDEQQRKVLNSIVGPAVLKKMLAEWEAHIGSGAKTVVLDIPLLFESGLQSWMDKVLVVYVDDDVQLRRLMARNGFTEEEALKRIRSQWPSAEKVKRADAVIDNNGNIEETRRQLLDILHQWDLLDKGGSGHHHHHH

SEQ ID NO: 1633 - DNA, 633 bp, synthetic construct
  misc_feature 1..633: note = Variant of 3'O-kinase
  source 1..633: mol_type = other DNA
atgctggttaccattggtttaacaggagggatcgcagcgggcaaatcgactgtgagtgccatgatgcgtgaactgggtctgccggtcatcgatgctgacgaggcagcacgcgccgttatgaagccaggcgaagaagcgtatcgcgacattgtagctgaattcgggccgggcatccttcgtgcggatggcgagatcgatcgccagaaactgggtgctatccgcttttcggacgaacaacaacgtaaggtgctgaattcgattgtaggtcctgcagtcctgaagaagatgctcgcggagtgggaagctcatatcgggtcaggcgccaagacggttgtgctggatatcccgctgctgttcgaatccggattgcaatcgtggatggacaaagttctcgtggtgtacgtcgatgatgatgttcagttacgccgccttatggcacgtaacgggtttactgaagaagaagctctgaagcgcattcgttcacagtggcccagtgcggagaaagttaaacgtgcagacgctgtcatcgacaataatggcaatattgaagaaacccgccgccagctgctggacattttacaccagtgggatctgctggacaaaggtggctccggccaccatcatcaccatcac

SEQ ID NO: 1634 - protein, 211 aa, synthetic construct
  REGION 1..211: note = Variant of 3'O-kinase
MLVTIGLTGGIAAGKSTVSAMMRELGLPVIDADEAARAVMKPGEEAYRDIVAEFGPGILRADGEIDRQKLGAIRFSDEQQRKVLNSIVGPAVLKKMLAEWEAHIGSGAKTVVLDIPLLFESGLQSWMDKVLVVYVDDDVQLRRLMARNGFTEEEALKRIRSQWPSAEKVKRADAVIDNNGNIEETRRQLLDILHQWDLLDKGGSGHHHHHH

SEQ ID NO: 1635 - DNA, 633 bp, synthetic construct
  misc_feature 1..633: note = Variant of 3'O-kinase
  source 1..633: mol_type = other DNA
atggcggttaccattggtttaacaggagggatcgcagcgggcaaatcgactgtgagtgccatgatgcgtgaactgggtctgccggtcatcgatgctgacgaggcagcacgcgccgttatgaagccaggcgaagaagcgtatcgcgacattgtagctgaattcgggccgaagatccttcgtgcggatggcgagatcgatcgccagaaactgggtgctatccgcttttcggacgaacaacaacgtaaggtgctgaattcgattgtaggtcctgcagtcctgaagaagatgctcgcggagtgggaagctcatatcgggtcaggcgccaagacggttgtgctggatatcccgctgctgttcgaatccggattgcaatcgtggatggacaaagttctcgtggtgtacgtcgatgatgatgttcagttacgccgccttatggcacgtaacgggtttactgaagaagaagctctgaagcgcattcgttcacagtggcccagtgcggagaaagttaaacgtgcagacgctgtcatcgacaataatggcaatattgaagaaacccgccgccagctgctggacattttacaccagtgggatctgctggacaaaggtggctccggccaccatcatcaccatcac

SEQ ID NO: 1636 - protein, 211 aa, synthetic construct
  REGION 1..211: note = Variant of 3'O-kinase
MAVTIGLTGGIAAGKSTVSAMMRELGLPVIDADEAARAVMKPGEEAYRDIVAEFGPKILRADGEIDRQKLGAIRFSDEQQRKVLNSIVGPAVLKKMLAEWEAHIGSGAKTVVLDIPLLFESGLQSWMDKVLVVYVDDDVQLRRLMARNGFTEEEALKRIRSQWPSAEKVKRADAVIDNNGNIEETRRQLLDILHQWDLLDKGGSGHHHHHH

SEQ ID NO: 1637 - DNA, 633 bp, synthetic construct
  misc_feature 1..633: note = Variant of 3'O-kinase
  source 1..633: mol_type = other DNA
atggcggttaccattggtttaacaggagggatcgcagcgggcaaatcgactgtgagtgccatgatgcgtgaactgggtctgccggtcatcgatgctgacgaggcagcacgcgccgttatgaagccaggcgaagaagcgtatcgcgacattgtagctgaattcgggccgggcatccttcgtgcggatggcgagatcgatcgccagaaactgggtgctatccgcttttcggacgaacaacaacgtaaggtgctgatgtcgattgtaggtcctgcagtcctgaagaagatgctcgcggagtgggaagctcatatcgggtcaggcgccaagacggttgtgctggatatcccgctgctgttcgaatccggattgcaatcgtggatggacaaagttctcgtggtgtacgtcgatgatgatgttcagttacgccgccttatggcacgtaacgggtttactgaagaagaagctctgaagcgcattcgttcacagtggcccagtgcggagaaagttaaacgtgcagacgctgtcatcgacaataatggcaatattgaagaaacccgccgccagctgctggacattttacaccagtgggatctgctggacaaaggtggctccggccaccatcatcaccatcac

SEQ ID NO: 1638 - protein, 211 aa, synthetic construct
  REGION 1..211: note = Variant of 3'O-kinase
MAVTIGLTGGIAAGKSTVSAMMRELGLPVIDADEAARAVMKPGEEAYRDIVAEFGPGILRADGEIDRQKLGAIRFSDEQQRKVLMSIVGPAVLKKMLAEWEAHIGSGAKTVVLDIPLLFESGLQSWMDKVLVVYVDDDVQLRRLMARNGFTEEEALKRIRSQWPSAEKVKRADAVIDNNGNIEETRRQLLDILHQWDLLDKGGSGHHHHHH

SEQ ID NO: 1639 - DNA, 633 bp, synthetic construct
  misc_feature 1..633: note = Variant of 3'O-kinase
  source 1..633: mol_type = other DNA
atggcggttaccattggtttaacaggagggatcgcagcgggcaaatcgactgtgagtgccatgatgcgtgaactgggtctgccggtcatcgatgctgacgaggcagcacgcgccgttatgaagccaggcgaagaagcgtatcgcgacattgtagctgaattcgggccggttatccttcgtgcggatggcgagatcgatcgccagaaactgggtgctatccgcttttcggacgaacaacaacgtaaggtgctgaattcgattgtaggtcctgcagtcctgaagaagatgctcgcggagtgggaagctcatatcgggtcaggcgccaagacggttgtgctggatatcccgctgctgttcgaatccggattgcaatcgtggatggacaaagttctcgtggtgtacgtcgatgatgatgttcagttacgccgccttatggcacgtaacgggtttactgaagaagaagctctgaagcgcattcgttcacagtggcccagtgcggagaaagttaaacgtgcagacgctgtcatcgacaataatggcaatattgaagaaacccgccgccagctgctggacattttacaccagtgggatctgctggacaaaggtggctccggccaccatcatcaccatcac

SEQ ID NO: 1640 - protein, 211 aa, synthetic construct
  REGION 1..211: note = Variant of 3'O-kinase
MAVTIGLTGGIAAGKSTVSAMMRELGLPVIDADEAARAVMKPGEEAYRDIVAEFGPVILRADGEIDRQKLGAIRFSDEQQRKVLNSIVGPAVLKKMLAEWEAHIGSGAKTVVLDIPLLFESGLQSWMDKVLVVYVDDDVQLRRLMARNGFTEEEALKRIRSQWPSAEKVKRADAVIDNNGNIEETRRQLLDILHQWDLLDKGGSGHHHHHH

SEQ ID NO: 1641 - DNA, 633 bp, synthetic construct
  misc_feature 1..633: note = Variant of 3'O-kinase
  source 1..633: mol_type = other DNA
atggcggttaccattggtttaacaggagggatcgcagcgggcaaatcgactgtgagtgccatgatgcgtgaactgggtctgccggtcatcgatgctgacgaggcagcacgcgccgttatgaagccaggcgaagaagcgtatcgcgacattgtagctgaattcgggccgggcatccttcgtgcggatggcgagatcgatcgccagaaactgggtgctatccgcttttcggacgaacaacaacgtaaggtgctgaattcgattgtaggtcctgcagtcctgaagaagatgctcgcggagtgggaagctcatatcgggtcaggcgccaagacggttgtgctggatatcccgctgctgttcgaatccggattgcaatcgtggatggacccggttctcgtggtgtacgtcgatgatgatgttcagttacgccgccttatggcacgtaacgggtttactgaagaagaagctctgaagcgcattcgttcacagtggcccagtgcggagaaagttaaacgtgcagacgctgtcatcgacaataatggcaatattgaagaaacccgccgccagctgctggacattttacaccagtgggatctgctggacaaaggtggctccggccaccatcatcaccatcac

SEQ ID NO: 1642 - protein, 211 aa, synthetic construct
  REGION 1..211: note = Variant of 3'O-kinase
MAVTIGLTGGIAAGKSTVSAMMRELGLPVIDADEAARAVMKPGEEAYRDIVAEFGPGILRADGEIDRQKLGAIRFSDEQQRKVLNSIVGPAVLKKMLAEWEAHIGSGAKTVVLDIPLLFESGLQSWMDPVLVVYVDDDVQLRRLMARNGFTEEEALKRIRSQWPSAEKVKRADAVIDNNGNIEETRRQLLDILHQWDLLDKGGSGHHHHHH

SEQ ID NO: 1643 - DNA, 633 bp, synthetic construct
  misc_feature 1..633: note = Variant of 3'O-kinase
  source 1..633: mol_type = other DNA
atggcggttaccattggtttaacaggagggatcgcagcgggcaaatcgactgtgagtgccatgatgcgtgaactgggtctgccggtcatcgatgctgacgaggcagcacgcgccgttatgaagccaggcgaagaagcgtatcgcgacattgtagctgaattcgggccgggcatccttcgtgcggatggcgagatcgatcgccagaaactgggtgctatccgcttttcggacggtcaacaacgtaaggtgctgaattcgattgtaggtcctgcagtcctgaagaagatgctcgcggagtgggaagctcatatcgggtcaggcgccaagacggttgtgctggatatcccgctgctgttcgaatccggattgcaatcgtggatggacaaagttctcgtggtgtacgtcgatgatgatgttcagttacgccgccttatggcacgtaacgggtttactgaagaagaagctctgaagcgcattcgttcacagtggcccagtgcggagaaagttaaacgtgcagacgctgtcatcgacaataatggcaatattgaagaaacccgccgccagctgctggacattttacaccagtgggatctgctggacaaaggtggctccggccaccatcatcaccatcac

SEQ ID NO: 1644 - protein, 211 aa, synthetic construct
  REGION 1..211: note = Variant of 3'O-kinase
MAVTIGLTGGIAAGKSTVSAMMRELGLPVIDADEAARAVMKPGEEAYRDIVAEFGPGILRADGEIDRQKLGAIRFSDGQQRKVLNSIVGPAVLKKMLAEWEAHIGSGAKTVVLDIPLLFESGLQSWMDKVLVVYVDDDVQLRRLMARNGFTEEEALKRIRSQWPSAEKVKRADAVIDNNGNIEETRRQLLDILHQWDLLDKGGSGHHHHHH

SEQ ID NO: 1645 - DNA, 633 bp, synthetic construct
  misc_feature 1..633: note = Variant of 3'O-kinase
  source 1..633: mol_type = other DNA
atggcggttaccattggtttaacaggagggatcgcagcgggcaaatcgactgtgagtgccatgatgcgtgaactgggtctgccggtcatcgatgctgacgaggcagcacgcgccgttatgaagccaggcgaagaagcgtatcgcgacattgtagctgaattcgggccgggcatccttcgtgcggatggcgagatcgatcgccagaaactgggtgctatccgcttttcggacgaacaacaacgtaaggtgctgaattcgattgtaggtcctgcagtcctgaagaagatgctcgcggagtgggaagctcatatcgggtcaggcgccaagacggttgtgctggatatcccgctgctgttcgaatccggattgcaatcgtggatggacaaagttctcgtggtgtacgtcgatgatgatgttcagttacgccgccttatggcacgtaacgggtttactgaagaaacggctctgaagcgcattcgttcacagtggcccagtgcggagaaagttaaacgtgcagacgctgtcatcgacaataatggcaatattgaagaaacccgccgccagctgctggacattttacaccagtgggatctgctggacaaaggtggctccggccaccatcatcaccatcac

SEQ ID NO: 1646 - protein, 211 aa, synthetic construct
  REGION 1..211: note = Variant of 3'O-kinase
MAVTIGLTGGIAAGKSTVSAMMRELGLPVIDADEAARAVMKPGEEAYRDIVAEFGPGILRADGEIDRQKLGAIRFSDEQQRKVLNSIVGPAVLKKMLAEWEAHIGSGAKTVVLDIPLLFESGLQSWMDKVLVVYVDDDVQLRRLMARNGFTEETALKRIRSQWPSAEKVKRADAVIDNNGNIEETRRQLLDILHQWDLLDKGGSGHHHHHH

SEQ ID NO: 1647 - DNA, 633 bp, synthetic construct
  misc_feature 1..633: note = Variant of 3'O-kinase
  source 1..633: mol_type = other DNA
atggcggttaccattggtttaacaggagggatcgcagcgggcaaatcgactgtgagtgccatgatgcgtgaactgggtctgccggtcatcgatgctgacgaggcagcacgcgccgttatgaagccaggcgaagaagcgtatcgcgacattgtagctgaattcgggccgggcatccttcgtgcggatggcgagatcgatcgccagaaactgggtgctatccgcttttcggacgaacaacaacgtaaggtgctgaattcgattgtaggtcctgcagtcctgaagaagatgctcgcggagtgggaagctcatatcgggtcaggcgccaagacggttgtgctggatatcccgctgctgttcgaatccggattgcaatcgtggatggacaaagttctcgtggtgtacgtcgatgatgatgttcagttacgccgccttatggcacgtaacgggtttactgaagaagaagctctgaagcgcattcgttcacagtggcccagtgcggagaaagttaaacgtgcagacgctgtcatcgacaataatggcaatattgaagaaaccgcgcgccagctgctggacattttacaccagtgggatctgctggacaaaggtggctccggccaccatcatcaccatcac

SEQ ID NO: 1648 - protein, 211 aa, synthetic construct
  REGION 1..211: note = Variant of 3'O-kinase
MAVTIGLTGGIAAGKSTVSAMMRELGLPVIDADEAARAVMKPGEEAYRDIVAEFGPGILRADGEIDRQKLGAIRFSDEQQRKVLNSIVGPAVLKKMLAEWEAHIGSGAKTVVLDIPLLFESGLQSWMDKVLVVYVDDDVQLRRLMARNGFTEEEALKRIRSQWPSAEKVKRADAVIDNNGNIEETARQLLDILHQWDLLDKGGSGHHHHHH

SEQ ID NO: 1649 - DNA, 633 bp, synthetic construct
  misc_feature 1..633: note = Variant of 3'O-kinase
  source 1..633: mol_type = other DNA
atggcggttaccattggtttaacaggagggatcgcagcgggcaaatcgactgtgagtgccatgatgcgtgaactgggtctgccggtcatcgatgctgacgaggcagcacgcgccgttatgaagccaggcgaagaagcgtatcgcgacattgtagctgaattcgggccgggcatccttcgtgcggatggcgagatcgatcgccagaaactgggtgctatccgcttttcggacgaacaacaacgtaagcagctgaattcgattgtaggtcctgcagtcctgaagaagatgctcgcggagtgggaagctcatatcgggtcaggcgccaagacggttgtgctggatatcccgctgctgttcgaatccggattgcaatcgtggatggacaaagttctcgtggtgtacgtcgatgatgatgttcagttacgccgccttatggcacgtaacgggtttactgaagaagaagctctgaagcgcattcgttcacagtggcccagtgcggagaaagttaaacgtgcagacgctgtcatcgacaataatggcaatattgaagaaacccgccgccagctgctggacattttacaccagtgggatctgctggacaaaggtggctccggccaccatcatcaccatcac

SEQ ID NO: 1650 - protein, 211 aa, synthetic construct
  REGION 1..211: note = Variant of 3'O-kinase
MAVTIGLTGGIAAGKSTVSAMMRELGLPVIDADEAARAVMKPGEEAYRDIVAEFGPGILRADGEIDRQKLGAIRFSDEQQRKQLNSIVGPAVLKKMLAEWEAHIGSGAKTVVLDIPLLFESGLQSWMDKVLVVYVDDDVQLRRLMARNGFTEEEALKRIRSQWPSAEKVKRADAVIDNNGNIEETRRQLLDILHQWDLLDKGGSGHHHHHH

SEQ ID NO: 1651 - DNA, 633 bp, synthetic construct
  misc_feature 1..633: note = Variant of 3'O-kinase
  source 1..633: mol_type = other DNA
atggcggttaccattggtttaacaggagggatcgcagcgggcaaatcgactgtgagtgccatgatgcgtgaactgggtctgccggtcatcgatgctgacgaggcagcacgcgccgttatgaagccaggcgaagaagcgtatcgcgacattgtagctgaattcgggccgggcatccttcgtgcggatggcgagatcgatcgccagaaactgggtgctatccgcttttcggacgaacaacaacgtaaggtgctgaattcgattgtaggtcctgcagtcctgaagaagatgacggcggagtgggaagctcatatcgggtcaggcgccaagacggttgtgctggatatcccgctgctgttcgaatccggattgcaatcgtggatggacaaagttctcgtggtgtacgtcgatgatgatgttcagttacgccgccttatggcacgtaacgggtttactgaagaagaagctctgaagcgcattcgttcacagtggcccagtgcggagaaagttaaacgtgcagacgctgtcatcgacaataatggcaatattgaagaaacccgccgccagctgctggacattttacaccagtgggatctgctggacaaaggtggctccggccaccatcatcaccatcac

SEQ ID NO: 1652 - protein, 211 aa, synthetic construct
  REGION 1..211: note = Variant of 3'O-kinase
MAVTIGLTGGIAAGKSTVSAMMRELGLPVIDADEAARAVMKPGEEAYRDIVAEFGPGILRADGEIDRQKLGAIRFSDEQQRKVLNSIVGPAVLKKMTAEWEAHIGSGAKTVVLDIPLLFESGLQSWMDKVLVVYVDDDVQLRRLMARNGFTEEEALKRIRSQWPSAEKVKRADAVIDNNGNIEETRRQLLDILHQWDLLDKGGSGHHHHHH

SEQ ID NO: 1653 - DNA, 633 bp, synthetic construct
  misc_feature 1..633: note = Variant of 3'O-kinase
  source 1..633: mol_type = other DNA
atggcggttaccattggtttaacaggagggatcgcagcgggcaaatcgactgtgagtgccatgatgcgtgaactgggtctgccggtcatcgatgctgacgaggcagcacgcgccgttatgaagccaggcgaagaagcgtatcgcgacattgtagctgaattcgggccgggcatccttcgtgcggattttgagatcgatcgccagaaactgggtgctatccgcttttcggacgaacaacaacgtaaggtgctgaattcgattgtaggtcctgcagtcctgaagaagatgctcgcggagtgggaagctcatatcgggtcaggcgccaagacggttgtgctggatatcccgctgctgttcgaatccggattgcaatcgtggatggacaaagttctcgtggtgtacgtcgatgatgatgttcagttacgccgccttatggcacgtaacgggtttactgaagaagaagctctgaagcgcattcgttcacagtggcccagtgcggagaaagttaaacgtgcagacgctgtcatcgacaataatggcaatattgaagaaacccgccgccagctgctggacattttacaccagtgggatctgctggacaaaggtggctccggccaccatcatcaccatcac

SEQ ID NO: 1654 - protein, 211 aa, synthetic construct
  REGION 1..211: note = Variant of 3'O-kinase
MAVTIGLTGGIAAGKSTVSAMMRELGLPVIDADEAARAVMKPGEEAYRDIVAEFGPGILRADFEIDRQKLGAIRFSDEQQRKVLNSIVGPAVLKKMLAEWEAHIGSGAKTVVLDIPLLFESGLQSWMDKVLVVYVDDDVQLRRLMARNGFTEEEALKRIRSQWPSAEKVKRADAVIDNNGNIEETRRQLLDILHQWDLLDKGGSGHHHHHH

SEQ ID NO: 1655 - DNA, 633 bp, synthetic construct
  misc_feature 1..633: note = Variant of 3'O-kinase
  source 1..633: mol_type = other DNA
atggcggttaccattggtttaacaggagggatcgcagcgggcaaatcgactgtgagtgccatgatgcgtgaactgggtctgccggtcatcgatgctgacgaggcagcacgcgccgttatgaagccaggcgaagaagcgtatcgcgacattgtagctgaattcgggccgggcatccttcgtgcggatggcgagatcgatcgccagaaactgggtgctatccgcttttcggacgaacaacaacgtaaggtgctgaattcgattgtaggtcctgcagtcctgaagaagatgctcgcggagtgggaagctcatcttgggtcaggcgccaagacggttgtgctggatatcccgctgctgttcgaatccggattgcaatcgtggatggacaaagttctcgtggtgtacgtcgatgatgatgttcagttacgccgccttatggcacgtaacgggtttactgaagaagaagctctgaagcgcattcgttcacagtggcccagtgcggagaaagttaaacgtgcagacgctgtcatcgacaataatggcaatattgaagaaacccgccgccagctgctggacattttacaccagtgggatctgctggacaaaggtggctccggccaccatcatcaccatcac

SEQ ID NO: 1656 - protein, 211 aa, synthetic construct
  REGION 1..211: note = Variant of 3'O-kinase
MAVTIGLTGGIAAGKSTVSAMMRELGLPVIDADEAARAVMKPGEEAYRDIVAEFGPGILRADGEIDRQKLGAIRFSDEQQRKVLNSIVGPAVLKKMLAEWEAHLGSGAKTVVLDIPLLFESGLQSWMDKVLVVYVDDDVQLRRLMARNGFTEEEALKRIRSQWPSAEKVKRADAVIDNNGNIEETRRQLLDILHQWDLLDKGGSGHHHHHH

SEQ ID NO: 1657 - DNA, 633 bp, synthetic construct
  misc_feature 1..633: note = Variant of 3'O-kinase
  source 1..633: mol_type = other DNA
atggcggttaccattggtttaacaggagggatcgcagcgggcaaatcgactgtgagtgccatgatgcgtgaactgggtctgccggtcatcgatgctgacgaggcagcacgcgccgttatgaagccaggcgaagaagcgtatcgcgacattgtagatgaattcgggccgggcatccttcgtgcggatggcgagatcgatcgccagaaactgggtgctatccgcttttcggacgaacaacaacgtaaggtgctgaattcgattgtaggtcctgcagtcctgaagaagatgctcgcggagtgggaagctcatatcgggtcaggcgccaagacggttgtgctggatatcccgctgctgttcgaatccggattgcaatcgtggatggacaaagttctcgtggtgtacgtcgatgatgatgttcagttacgccgccttatggcacgtaacgggtttactgaagaagaagctctgaagcgcattcgttcacagtggcccagtgcggagaaagttaaacgtgcagacgctgtcatcgacaataatggcaatattgaagaaacccgccgccagctgctggacattttacaccagtgggatctgctggacaaaggtggctccggccaccatcatcaccatcac

SEQ ID NO: 1658 - protein, 211 aa, synthetic construct
  REGION 1..211: note = Variant of 3'O-kinase
MAVTIGLTGGIAAGKSTVSAMMRELGLPVIDADEAARAVMKPGEEAYRDIVDEFGPGILRADGEIDRQKLGAIRFSDEQQRKVLNSIVGPAVLKKMLAEWEAHIGSGAKTVVLDIPLLFESGLQSWMDKVLVVYVDDDVQLRRLMARNGFTEEEALKRIRSQWPSAEKVKRADAVIDNNGNIEETRRQLLDILHQWDLLDKGGSGHHHHHH

SEQ ID NO: 1659 - DNA, 633 bp, synthetic construct
  misc_feature 1..633: note = Variant of 3'O-kinase
  source 1..633: mol_type = other DNA
atggcggttaccattggtttaacaggagggatcgcagcgggcaaatcgactgtgagtgccatgatgcgtgaactgggtctgccggtcatcgatgctgacgaggcagcacgcgccgttatgaagccaggcgaagaagcgtatcgcgacattgtagctgaattcgggccgggcatccttcgtgcggatggcgagatcgatcgccagaaactgggtgctatccgcttttcggacgaacaacaacgtaaggtgctgaattcgattgtaggtcctgcagtcctgaagaagatgctcgcggagtgggaagctcatatcgggtcaggcgccaagacggttgtgctggatatcccgctgctgttcgaatccggattgcaatcgtggatggacaaagttctcgtggtgtacgtcgatgatgatttgcagttacgccgccttatggcacgtaacgggtttactgaagaagaagctctgaagcgcattcgttcacagtggcccagtgcggagaaagttaaacgtgcagacgctgtcatcgacaataatggcaatattgaagaaacccgccgccagctgctggacattttacaccagtgggatctgctggacaaaggtggctccggccaccatcatcaccatcac

SEQ ID NO: 1660 - protein, 211 aa, synthetic construct
  REGION 1..211: note = Variant of 3'O-kinase
MAVTIGLTGGIAAGKSTVSAMMRELGLPVIDADEAARAVMKPGEEAYRDIVAEFGPGILRADGEIDRQKLGAIRFSDEQQRKVLNSIVGPAVLKKMLAEWEAHIGSGAKTVVLDIPLLFESGLQSWMDKVLVVYVDDDLQLRRLMARNGFTEEEALKRIRSQWPSAEKVKRADAVIDNNGNIEETRRQLLDILHQWDLLDKGGSGHHHHHH

SEQ ID NO: 1661 - DNA, 633 bp, synthetic construct
  misc_feature 1..633: note = Variant of 3'O-kinase
  source 1..633: mol_type = other DNA
atggcggttaccattggtttaacaggagggatcgcagcgggcaaatcgactgtgagtgccatgatgcgtgaactgggtctgccggtcatcgattgggacgaggcagcacgcgccgttatgaagccaggcgaagaagcgtatcgcgacattgtagctgaattcgggccgggcatccttcgtgcggatggcgagatcgatcgccagaaactgggtgctatccgcttttcggacgaacaacaacgtaaggtgctgaattcgattgtaggtcctgcagtcctgaagaagatgctcgcggagtgggaagctcatatcgggtcaggcgccaagacggttgtgctggatatcccgctgctgttcgaatccggattgcaatcgtggatggacaaagttctcgtggtgtacgtcgatgatgatgttcagttacgccgccttatggcacgtaacgggtttactgaagaagaagctctgaagcgcattcgttcacagtggcccagtgcggagaaagttaaacgtgcagacgctgtcatcgacaataatggcaatattgaagaaacccgccgccagctgctggacattttacaccagtgggatctgctggacaaaggtggctccggccaccatcatcaccatcac

SEQ ID NO: 1662 - protein, 211 aa, synthetic construct
  REGION 1..211: note = Variant of 3'O-kinase
MAVTIGLTGGIAAGKSTVSAMMRELGLPVIDWDEAARAVMKPGEEAYRDIVAEFGPGILRADGEIDRQKLGAIRFSDEQQRKVLNSIVGPAVLKKMLAEWEAHIGSGAKTVVLDIPLLFESGLQSWMDKVLVVYVDDDVQLRRLMARNGFTEEEALKRIRSQWPSAEKVKRADAVIDNNGNIEETRRQLLDILHQWDLLDKGGSGHHHHHH

SEQ ID NO: 1663 - DNA, 633 bp, synthetic construct
  misc_feature 1..633: note = Variant of 3'O-kinase
  source 1..633: mol_type = other DNA
atggcggttaccattggtttaacaggagggatcgcagcgggcaaatcgactgtgagtgccatgatgcgtgaactgggtctgccggtcatcgatgctgacgaggcagcacgcgccgttatgaagccaggcgaagaagcgtatcgcgacattgtagctgaattcgggccgggcatccttcgtgcggatggcgagatcgatcgccagaaactgggtgctatccgcttttcggacgaacaacaacgtaaggtgctgaattcgattgtaggtcctgcagtcctgaagaagatgctcgcggagtgggaagctcatatcgggtcaggcgccaagacggttgtgctggatatcccgctgctgttcgaatccggattgcaatcgtggatggacaaagttctcgtggtgtacgtcgatgatgatgttcagttacgccgccttatggcacgtaacgggtttactgaagaagaagctctgaagcgcattcgttcacagtggcccagtgcggagaaagttaaacgtgcagacgctgtcatcgacaataatggcaatattgaagaaacccgccgccagctgctggacattttacaccagtgggatccgctggacaaaggtggctccggccaccatcatcaccatcac

SEQ ID NO: 1664 - protein, 211 aa, synthetic construct
  REGION 1..211: note = Variant of 3'O-kinase
MAVTIGLTGGIAAGKSTVSAMMRELGLPVIDADEAARAVMKPGEEAYRDIVAEFGPGILRADGEIDRQKLGAIRFSDEQQRKVLNSIVGPAVLKKMLAEWEAHIGSGAKTVVLDIPLLFESGLQSWMDKVLVVYVDDDVQLRRLMARNGFTEEEALKRIRSQWPSAEKVKRADAVIDNNGNIEETRRQLLDILHQWDPLDKGGSGHHHHHH

SEQ ID NO: 1665 - DNA, 633 bp, synthetic construct
  misc_feature 1..633: note = Variant of 3'O-kinase
  source 1..633: mol_type = other DNA
atggcggttaccattggtttaacaggagggatcgcagcgggcaaatcgactgtgagtgccatgatgcgtgaactgggtctgccggtcatcgatgctgacgaggcaccgcgcgccgttatgaagccaggcgaagaagcgtatcgcgacattgtagctgaattcgggccgggcatccttcgtgcggatggcgagatcgatcgccagaaactgggtgctatccgcttttcggacgaacaacaacgtaaggtgctgaattcgattgtaggtcctgcagtcctgaagaagatgctcgcggagtgggaagctcatatcgggtcaggcgccaagacggttgtgctggatatcccgctgctgttcgaatccggattgcaatcgtggatggacaaagttctcgtggtgtacgtcgatgatgatgttcagttacgccgccttatggcacgtaacgggtttactgaagaagaagctctgaagcgcattcgttcacagtggcccagtgcggagaaagttaaacgtgcagacgctgtcatcgacaataatggcaatattgaagaaacccgccgccagctgctggacattttacaccagtgggatctgctggacaaaggtggctccggccaccatcatcaccatcac

SEQ ID NO: 1666 - protein, 211 aa, synthetic construct
  REGION 1..211: note = Variant of 3'O-kinase
MAVTIGLTGGIAAGKSTVSAMMRELGLPVIDADEAPRAVMKPGEEAYRDIVAEFGPGILRADGEIDRQKLGAIRFSDEQQRKVLNSIVGPAVLKKMLAEWEAHIGSGAKTVVLDIPLLFESGLQSWMDKVLVVYVDDDVQLRRLMARNGFTEEEALKRIRSQWPSAEKVKRADAVIDNNGNIEETRRQLLDILHQWDLLDKGGSGHHHHHH

SEQ ID NO: 1667 - DNA, 633 bp, synthetic construct
  misc_feature 1..633: note = Variant of 3'O-kinase
  source 1..633: mol_type = other DNA
atggcggcgaccattggtttaacaggagggatcgcagcgggcaaatcgactgtgagtgccatgatgcgtgaactgggtctgccggtcatcgatgctgacgaggcagcacgcgccgttatgaagccaggcgaagaagcgtatcgcgacattgtagctgaattcgggccgggcatccttcgtgcggatggcgagatcgatcgccagaaactgggtgctatccgcttttcggacgaacaacaacgtaaggtgctgaattcgattgtaggtcctgcagtcctgaagaagatgctcgcggagtgggaagctcatatcgggtcaggcgccaagacggttgtgctggatatcccgctgctgttcgaatccggattgcaatcgtggatggacaaagttctcgtggtgtacgtcgatgatgatgttcagttacgccgccttatggcacgtaacgggtttactgaagaagaagctctgaagcgcattcgttcacagtggcccagtgcggagaaagttaaacgtgcagacgctgtcatcgacaataatggcaatattgaagaaacccgccgccagctgctggacattttacaccagtgggatctgctggacaaaggtggctccggccaccatcatcaccatcac

SEQ ID NO: 1668 - protein, 211 aa, synthetic construct
  REGION 1..211: note = Variant of 3'O-kinase
MAATIGLTGGIAAGKSTVSAMMRELGLPVIDADEAARAVMKPGEEAYRDIVAEFGPGILRADGEIDRQKLGAIRFSDEQQRKVLNSIVGPAVLKKMLAEWEAHIGSGAKTVVLDIPLLFESGLQSWMDKVLVVYVDDDVQLRRLMARNGFTEEEALKRIRSQWPSAEKVKRADAVIDNNGNIEETRRQLLDILHQWDLLDKGGSGHHHHHH

SEQ ID NO: 1669 - DNA, 633 bp, synthetic construct
  misc_feature 1..633: note = Variant of 3'O-kinase
  source 1..633: mol_type = other DNA
atggcggttaccattggtttaacaggagggatcgcagcgggcaaatcgactgtgagtgccatgatgcgtgaactgggtctgccggtcatcgatgctgacgaggcagcacgcgccgttatgaagccaggcgaagaagcgtatcgcgacattgtagctgaattcgggccgggcatccttcgtgcggatggcgagatcgatcgccagaaactgggtgctatccgcttttcggacgaacaagtgcgtaaggtgctgaattcgattgtaggtcctgcagtcctgaagaagatgctcgcggagtgggaagctcatatcgggtcaggcgccaagacggttgtgctggatatcccgctgctgttcgaatccggattgcaatcgtggatggacaaagttctcgtggtgtacgtcgatgatgatgttcagttacgccgccttatggcacgtaacgggtttactgaagaagaagctctgaagcgcattcgttcacagtggcccagtgcggagaaagttaaacgtgcagacgctgtcatcgacaataatggcaatattgaagaaacccgccgccagctgctggacattttacaccagtgggatctgctggacaaaggtggctccggccaccatcatcaccatcac

SEQ ID NO: 1670 - protein, 211 aa, synthetic construct
  REGION 1..211: note = Variant of 3'O-kinase
MAVTIGLTGGIAAGKSTVSAMMRELGLPVIDADEAARAVMKPGEEAYRDIVAEFGPGILRADGEIDRQKLGAIRFSDEQVRKVLNSIVGPAVLKKMLAEWEAHIGSGAKTVVLDIPLLFESGLQSWMDKVLVVYVDDDVQLRRLMARNGFTEEEALKRIRSQWPSAEKVKRADAVIDNNGNIEETRRQLLDILHQWDLLDKGGSGHHHHHH

SEQ ID NO: 1671 - DNA, 633 bp, synthetic construct
  misc_feature 1..633: note = Variant of 3'O-kinase
  source 1..633: mol_type = other DNA
atggcggttaccattggtttaacaggagggatcgcagcgggcaaatcgactgtgagtgccatgatgcgtgaactgggtctgccggtcatcgatgctgacgaggcagcacgcgccgttatgaagccaggcgaagaagcgtatgaggacattgtagctgaattcgggccgggcatccttcgtgcggatggcgagatcgatcgccagaaactgggtgctatccgcttttcggacgaacaacaacgtaaggtgctgaattcgattgtaggtcctgcagtcctgaagaagatgctcgcggagtgggaagctcatatcgggtcaggcgccaagacggttgtgctggatatcccgctgctgttcgaatccggattgcaatcgtggatggacaaagttctcgtggtgtacgtcgatgatgatgttcagttacgccgccttatggcacgtaacgggtttactgaagaagaagctctgaagcgcattcgttcacagtggcccagtgcggagaaagttaaacgtgcagacgctgtcatcgacaataatggcaatattgaagaaacccgccgccagctgctggacattttacaccagtgggatctgctggacaaaggtggctccggccaccatcatcaccatcac

SEQ ID NO: 1672 - protein, 211 aa, synthetic construct
  REGION 1..211: note = Variant of 3'O-kinase
MAVTIGLTGGIAAGKSTVSAMMRELGLPVIDADEAARAVMKPGEEAYEDIVAEFGPGILRADGEIDRQKLGAIRFSDEQQRKVLNSIVGPAVLKKMLAEWEAHIGSGAKTVVLDIPLLFESGLQSWMDKVLVVYVDDDVQLRRLMARNGFTEEEALKRIRSQWPSAEKVKRADAVIDNNGNIEETRRQLLDILHQWDLLDKGGSGHHHHHH

SEQ ID NO: 1673 - DNA, 633 bp, synthetic construct
  misc_feature 1..633: note = Variant of 3'O-kinase
  source 1..633: mol_type = other DNA
atggcggttaccattggtttaacaggagggatcgcagcgggcaaatcgactgtgagtgccatgatgcgtgaactgggtctgccggtcatcgatgctgacgaggcagcacgcgccgttatgaagccaggcgaagaagcgtatcgcgacattgtagctgaattcgggccgggcatccttcgtgcggatggcgagatcgatcgccagaaactgggtgctatccgcttttcggacgaacaacaacgtaaggtgctgaattcgattgtaggtcctgcagtcctgaagaagatgctcgcggagaatgaagctcatatcgggtcaggcgccaagacggttgtgctggatatcccgctgctgttcgaatccggattgcaatcgtggatggacaaagttctcgtggtgtacgtcgatgatgatgttcagttacgccgccttatggcacgtaacgggtttactgaagaagaagctctgaagcgcattcgttcacagtggcccagtgcggagaaagttaaacgtgcagacgctgtcatcgacaataatggcaatattgaagaaacccgccgccagctgctggacattttacaccagtgggatctgctggacaaaggtggctccggccaccatcatcaccatcac

SEQ ID NO: 1674 - protein, 211 aa, synthetic construct
  REGION 1..211: note = Variant of 3'O-kinase
MAVTIGLTGGIAAGKSTVSAMMRELGLPVIDADEAARAVMKPGEEAYRDIVAEFGPGILRADGEIDRQKLGAIRFSDEQQRKVLNSIVGPAVLKKMLAENEAHIGSGAKTVVLDIPLLFESGLQSWMDKVLVVYVDDDVQLRRLMARNGFTEEEALKRIRSQWPSAEKVKRADAVIDNNGNIEETRRQLLDILHQWDLLDKGGSGHHHHHH

SEQ ID NO: 1675 - DNA, 633 bp, synthetic construct
  misc_feature 1..633: note = Variant of 3'O-kinase
  source 1..633: mol_type = other DNA
atggcggttaccattggtttaacaggagggatcgcagcgggcaaatcgactgtgagtgccatgatgcgtgaactgggtctgccggtcatcgatgctgacgaggcagcacgcgccgttatgaagccaggcgaagaagcgtatcgcgacattgtagctgaattcgggccgggcatccttcgtgcggatggcgagatcgatcgccagaaactgggtgctatccgcttttcggacgaacaacaacgtaaggtgctgaattcgattgtaggtcctgcagtcctgaagaagatgctcgcggagtgggaagctcatatcgggtcaggcgccaagacggttgtgctggatatcccgctgctgttcgaatccggattgcaatcgtggatggacaaagttctcgtggtgtacgtcgatgatgatgttcagttacgccgccttatggcacgtaacgggtttactgaagaagaagctctgaagcgcattcgttcacagtggcccagtgcggagaaagttaaacgtgcagacgctgtcatcgacaataatggcaatattgaagaaacccgccgccagctgctggacattttacaccagtgggatggtctggacaaaggtggctccggccaccatcatcaccatcac

SEQ ID NO: 1676 - protein, 211 aa, synthetic construct
  REGION 1..211: note = Variant of 3'O-kinase
MAVTIGLTGGIAAGKSTVSAMMRELGLPVIDADEAARAVMKPGEEAYRDIVAEFGPGILRADGEIDRQKLGAIRFSDEQQRKVLNSIVGPAVLKKMLAEWEAHIGSGAKTVVLDIPLLFESGLQSWMDKVLVVYVDDDVQLRRLMARNGFTEEEALKRIRSQWPSAEKVKRADAVIDNNGNIEETRRQLLDILHQWDGLDKGGSGHHHHHH

SEQ ID NO: 1677 - DNA, 633 bp, synthetic construct
  misc_feature 1..633: note = Variant of 3'O-kinase
  source 1..633: mol_type = other DNA
atggcggttaccattggtttaacaggagggatcgcagcgggcaaatcgactgtgagtgccatgatgcgtgaactgggtctgccggtcatcgatgctgacgaggcagcacgcgccgttatgaagccaggcgaagaagcgtatcgcgacattgtagctgaattcgggccgggcatccttcgtgcggatcaggagatcgatcgccagaaactgggtgctatccgcttttcggacgaacaacaacgtaaggtgctgaattcgattgtaggtcctgcagtcctgaagaagatgctcgcggagtgggaagctcatatcgggtcaggcgccaagacggttgtgctggatatcccgctgctgttcgaatccggattgcaatcgtggatggacaaagttctcgtggtgtacgtcgatgatgatgttcagttacgccgccttatggcacgtaacgggtttactgaagaagaagctctgaagcgcattcgttcacagtggcccagtgcggagaaagttaaacgtgcagacgctgtcatcgacaataatggcaatattgaagaaacccgccgccagctgctggacattttacaccagtgggatctgctggacaaaggtggctccggccaccatcatcaccatcac

SEQ ID NO: 1678 - protein, 211 aa, synthetic construct
  REGION 1..211: note = Variant of 3'O-kinase
MAVTIGLTGGIAAGKSTVSAMMRELGLPVIDADEAARAVMKPGEEAYRDIVAEFGPGILRADQEIDRQKLGAIRFSDEQQRKVLNSIVGPAVLKKMLAEWEAHIGSGAKTVVLDIPLLFESGLQSWMDKVLVVYVDDDVQLRRLMARNGFTEEEALKRIRSQWPSAEKVKRADAVIDNNGNIEETRRQLLDILHQWDLLDKGGSGHHHHHH

SEQ ID NO: 1679 - DNA, 633 bp, synthetic construct
  misc_feature 1..633: note = Variant of 3'O-kinase
  source 1..633: mol_type = other DNA
atggcggttaccattggtttaacaggagggatcgcagcgggcaaatcgactgtgagtgccatgatgcgtgaactgggtctgccggtcatcgatgctgacgaggcagcacgcgccgttatgaagccaggcgaagaagcgtatcgcgacattgtagctgaattcgggccgggcatccttcgtgcggatggcgagatcgatcgccagaaactgggtgctatccgcttttcggacgaacaacaacgtaaggtgctgaattcgattgtaggtcctgcaactctgaagaagatgctcgcggagtgggaagctcatatcgggtcaggcgccaagacggttgtgctggatatcccgctgctgttcgaatccggattgcaatcgtggatggacaaagttctcgtggtgtacgtcgatgatgatgttcagttacgccgccttatggcacgtaacgggtttactgaagaagaagctctgaagcgcattcgttcacagtggcccagtgcggagaaagttaaacgtgcagacgctgtcatcgacaataatggcaatattgaagaaacccgccgccagctgctggacattttacaccagtgggatctgctggacaaaggtggctccggccaccatcatcaccatcac

SEQ ID NO: 1680 - protein, 211 aa, synthetic construct
  REGION 1..211: note = Variant of 3'O-kinase
MAVTIGLTGGIAAGKSTVSAMMRELGLPVIDADEAARAVMKPGEEAYRDIVAEFGPGILRADGEIDRQKLGAIRFSDEQQRKVLNSIVGPATLKKMLAEWEAHIGSGAKTVVLDIPLLFESGLQSWMDKVLVVYVDDDVQLRRLMARNGFTEEEALKRIRSQWPSAEKVKRADAVIDNNGNIEETRRQLLDILHQWDLLDKGGSGHHHHHH

SEQ ID NO: 1681 - DNA, 633 bp, synthetic construct
  misc_feature 1..633: note = Variant of 3'O-kinase
  source 1..633: mol_type = other DNA
atggcggttaccattggtttaacaggagggatcgcagcgggcaaatcgactgtgagtgccatgatgcgtgaactgggtctgccggtcatcgatgctgacgaggcagcacgcgccgttatgaagccaggcgaagaagcgtatcgcgacattgtagctgaattcgggccgggcatccttcgtgcggatggcgagatcgatcgccagaaactgggtgctatccgcttttcggacgaacaacaacgtaaggtgctgaattcgattgtaggtcctgcagtcctgaagaagatgctcgcggagtgggaagctcatatcgggtcaggcgccaagacggttgtgctggatatcccgctgctgttcgaatccggattgcaatcgtggatggacaaagttctcgtggtgtacgtcgatgatgatcgtcagttacgccgccttatggcacgtaacgggtttactgaagaagaagctctgaagcgcattcgttcacagtggcccagtgcggagaaagttaaacgtgcagacgctgtcatcgacaataatggcaatattgaagaaacccgccgccagctgctggacattttacaccagtgggatctgctggacaaaggtggctccggccaccatcatcaccatcac

SEQ ID NO: 1682 - protein, 211 aa, synthetic construct
  REGION 1..211: note = Variant of 3'O-kinase
MAVTIGLTGGIAAGKSTVSAMMRELGLPVIDADEAARAVMKPGEEAYRDIVAEFGPGILRADGEIDRQKLGAIRFSDEQQRKVLNSIVGPAVLKKMLAEWEAHIGSGAKTVVLDIPLLFESGLQSWMDKVLVVYVDDDRQLRRLMARNGFTEEEALKRIRSQWPSAEKVKRADAVIDNNGNIEETRRQLLDILHQWDLLDKGGSGHHHHHH

SEQ ID NO: 1683 - DNA, 633 bp, synthetic construct
  misc_feature 1..633: note = Variant of 3'O-kinase
  source 1..633: mol_type = other DNA
atggcggttaccattggtttaacaggagggatcgcagcgggcaaatcgactgtgagtgccatgatgcgtgaactgggtctgccggtcatcgatgctgacgaggcagcacgcgccgttatgaagccaggcgaagaagcgtatcgcgacattgtagctgaattcgggccgggcatccttcgtgcggatggcgagatcgatcgccagaaactgggtgctatccgcttttcggacgaacaacaacgtaaggtgctgaattcgattgtaggtcctgcagtcctgaagaagatgctcgcggagtgggaagctcatatcgggtcaggcgccaagacggttgtgctggatatcccgctgctgttcgaatccggattgcaatcgtggatggacaaagttctcgtggtgtacgtcgatgatgatacgcagttacgccgccttatggcacgtaacgggtttactgaagaagaagctctgaagcgcattcgttcacagtggcccagtgcggagaaagttaaacgtgcagacgctgtcatcgacaataatggcaatattgaagaaacccgccgccagctgctggacattttacaccagtgggatctgctggacaaaggtggctccggccaccatcatcaccatcac

SEQ ID NO: 1684 - protein, 211 aa, synthetic construct
  REGION 1..211: note = Variant of 3'O-kinase
MAVTIGLTGGIAAGKSTVSAMMRELGLPVIDADEAARAVMKPGEEAYRDIVAEFGPGILRADGEIDRQKLGAIRFSDEQQRKVLNSIVGPAVLKKMLAEWEAHIGSGAKTVVLDIPLLFESGLQSWMDKVLVVYVDDDTQLRRLMARNGFTEEEALKRIRSQWPSAEKVKRADAVIDNNGNIEETRRQLLDILHQWDLLDKGGSGHHHHHH

SEQ ID NO: 1685 - DNA, 633 bp, synthetic construct
  misc_feature 1..633: note = Variant of 3'O-kinase
  source 1..633: mol_type = other DNA
atggcggttaccattggtttaacaggagggatcgcagcgggcaaatcgactgtgagtgccatgatgcgtgaactgggtctgccggtcatcgatgctgacgaggcagcacgcgccgttatgaagccaggcgaagaagcgtatcgcgacattgtagctgaattcgggccgggcatccttcgtgcggatggcgagatcgatcgccagaaactgggtgctatccgcttttcggacgaacaacaacgtaaggtgctgaattcgattgtaggtcctgcagtcctgaagaagatgctcgcggagtgggaagctcatatcgggtcaggcgccaagacggttgtgctggatatcccgctgctgttcgaatccggattgcaatcgtggatggacaaagttctcgtggtgtacgtcgatgatgatgttcagttacgccgccttatggcacgtaacgggtttactgaagttgaagctctgaagcgcattcgttcacagtggcccagtgcggagaaagttaaacgtgcagacgctgtcatcgacaataatggcaatattgaagaaacccgccgccagctgctggacattttacaccagtgggatctgctggacaaaggtggctccggccaccatcatcaccatcac

SEQ ID NO: 1686 - protein, 211 aa, synthetic construct
  REGION 1..211: note = Variant of 3'O-kinase
MAVTIGLTGGIAAGKSTVSAMMRELGLPVIDADEAARAVMKPGEEAYRDIVAEFGPGILRADGEIDRQKLGAIRFSDEQQRKVLNSIVGPAVLKKMLAEWEAHIGSGAKTVVLDIPLLFESGLQSWMDKVLVVYVDDDVQLRRLMARNGFTEVEALKRIRSQWPSAEKVKRADAVIDNNGNIEETRRQLLDILHQWDLLDKGGSGHHHHHH

SEQ ID NO: 1687 - DNA, 633 bp, synthetic construct
  misc_feature 1..633: note = Variant of 3'O-kinase
  source 1..633: mol_type = other DNA
atggcggttaccattggtttaacaggagggatcgcagcgggcaaatcgactgtgagtgccatgatgcgtgaactgggtctgccggtcatcgatgctgacgaggcagcacgcgccgttatgaagccaggcgaagaagcgtatcctgacattgtagctgaattcgggccgggcatccttcgtgcggatggcgagatcgatcgccagaaactgggtgctatccgcttttcggacgaacaacaacgtaaggtgctgaattcgattgtaggtcctgcagtcctgaagaagatgctcgcggagtgggaagctcatatcgggtcaggcgccaagacggttgtgctggatatcccgctgctgttcgaatccggattgcaatcgtggatggacaaagttctcgtggtgtacgtcgatgatgatgttcagttacgccgccttatggcacgtaacgggtttactgaagaagaagctctgaagcgcattcgttcacagtggcccagtgcggagaaagttaaacgtgcagacgctgtcatcgacaataatggcaatattgaagaaacccgccgccagctgctggacattttacaccagtgggatctgctggacaaaggtggctccggccaccatcatcaccatcac

SEQ ID NO: 1688 - protein, 211 aa, synthetic construct
  REGION 1..211: note = Variant of 3'O-kinase
MAVTIGLTGGIAAGKSTVSAMMRELGLPVIDADEAARAVMKPGEEAYPDIVAEFGPGILRADGEIDRQKLGAIRFSDEQQRKVLNSIVGPAVLKKMLAEWEAHIGSGAKTVVLDIPLLFESGLQSWMDKVLVVYVDDDVQLRRLMARNGFTEEEALKRIRSQWPSAEKVKRADAVIDNNGNIEETRRQLLDILHQWDLLDKGGSGHHHHHH

SEQ ID NO: 1689 - DNA, 633 bp, synthetic construct
  misc_feature 1..633: note = Variant of 3'O-kinase
  source 1..633: mol_type = other DNA
atggcggttaccattggtttaacaggagggatcgcagcgggcaaatcgactgtgagtgccatgatgcgtgaactgggtctgccggtcatcgatgctgacgaggcagcacgcgccgttatgaagccaggcgaagaagcgtatcgcgacattgtagctgaattcgggaagggcatccttcgtgcggatggcgagatcgatcgccagaaactgggtgctatccgcttttcggacgaacaacaacgtaaggtgctgaattcgattgtaggtcctgcagtcctgaagaagatgctcgcggagtgggaagctcatatcgggtcaggcgccaagacggttgtgctggatatcccgctgctgttcgaatccggattgcaatcgtggatggacaaagttctcgtggtgtacgtcgatgatgatgttcagttacgccgccttatggcacgtaacgggtttactgaagaagaagctctgaagcgcattcgttcacagtggcccagtgcggagaaagttaaacgtgcagacgctgtcatcgacaataatggcaatattgaagaaacccgccgccagctgctggacattttacaccagtgggatctgctggacaaaggtggctccggccaccatcatcaccatcac

SEQ ID NO: 1690 - protein, 211 aa, synthetic construct
  REGION 1..211: note = Variant of 3'O-kinase
MAVTIGLTGGIAAGKSTVSAMMRELGLPVIDADEAARAVMKPGEEAYRDIVAEFGKGILRADGEIDRQKLGAIRFSDEQQRKVLNSIVGPAVLKKMLAEWEAHIGSGAKTVVLDIPLLFESGLQSWMDKVLVVYVDDDVQLRRLMARNGFTEEEALKRIRSQWPSAEKVKRADAVIDNNGNIEETRRQLLDILHQWDLLDKGGSGHHHHHH

SEQ ID NO: 1691 - DNA, 633 bp, synthetic construct
  misc_feature 1..633: note = Variant of 3'O-kinase
  source 1..633: mol_type = other DNA
atggcggttaccattggtttaacaggagggatcgcagcgggcaaatcgactgtgagtgccatgatgcgtgaactgggtctgccggtcatcgatgctgacgaggcagcacgcgccgttatgaagccaggcgaagaagcgtatcgcgacattgtagctgaattcgggccgggcatccttcgtgcggatggcgagatcgatcgccagaaactgggtgctatccgcttttcggacgaacaacaacgtaaggtgctgaattcgattgtaggtcctgcagtcctggggaagatgctcgcggagtgggaagctcatatcgggtcaggcgccaagacggttgtgctggatatcccgctgctgttcgaatccggattgcaatcgtggatggacaaagttctcgtggtgtacgtcgatgatgatgttcagttacgccgccttatggcacgtaacgggtttactgaagaagaagctctgaagcgcattcgttcacagtggcccagtgcggagaaagttaaacgtgcagacgctgtcatcgacaataatggcaatattgaagaaacccgccgccagctgctggacattttacaccagtgggatctgctggacaaaggtggctccggccaccatcatcaccatcac

SEQ ID NO: 1692 - protein, 211 aa, synthetic construct
  REGION 1..211: note = Variant of 3'O-kinase
MAVTIGLTGGIAAGKSTVSAMMRELGLPVIDADEAARAVMKPGEEAYRDIVAEFGPGILRADGEIDRQKLGAIRFSDEQQRKVLNSIVGPAVLGKMLAEWEAHIGSGAKTVVLDIPLLFESGLQSWMDKVLVVYVDDDVQLRRLMARNGFTEEEALKRIRSQWPSAEKVKRADAVIDNNGNIEETRRQLLDILHQWDLLDKGGSGHHHHHH

SEQ ID NO: 1693 - DNA, 633 bp, synthetic construct
  misc_feature 1..633: note = Variant of 3'O-kinase
  source 1..633: mol_type = other DNA
atggcggttaccattggtttaacaggagggatcgcagcgggcaaatcgactgtgagtgccatgatgcgtgaactgggtctgccggtcatcgatgctgacgaggcagcacgcgccgttatgaagccaggcgaagaagcgtatcgcgacattgctgctgaattcgggccgggcatccttcgtgcggatggcgagatcgatcgccagaaactgggtgctatccgcttttcggacgaacaacaacgtaaggtgctgaattcgattgtaggtcctgcagtcctgaagaagatgctcgcggagtgggaagctcatatcgggtcaggcgccaagacggttgtgctggatatcccgctgctgttcgaatccggattgcaatcgtggatggacaaagttctcgtggtgtacgtcgatgatgatgttcagttacgccgccttatggcacgtaacgggtttactgaagaagaagctctgaagcgcattcgttcacagtggcccagtgcggagaaagttaaacgtgcagacgctgtcatcgacaataatggcaatattgaagaaacccgccgccagctgctggacattttacaccagtgggatctgctggacaaaggtggctccggccaccatcatcaccatcac

SEQ ID NO: 1694 - protein, 211 aa, synthetic construct
  REGION 1..211: note = Variant of 3'O-kinase
MAVTIGLTGGIAAGKSTVSAMMRELGLPVIDADEAARAVMKPGEEAYRDIAAEFGPGILRADGEIDRQKLGAIRFSDEQQRKVLNSIVGPAVLKKMLAEWEAHIGSGAKTVVLDIPLLFESGLQSWMDKVLVVYVDDDVQLRRLMARNGFTEEEALKRIRSQWPSAEKVKRADAVIDNNGNIEETRRQLLDILHQWDLLDKGGSGHHHHHH

SEQ ID NO: 1695 - DNA, 633 bp, synthetic construct
  misc_feature 1..633: note = Variant of 3'O-kinase
  source 1..633: mol_type = other DNA
atggcggttaccattggtttaacaggagggatcgcagcgggcaaatcgactgtgagtgccatgatgcgtgaactgggtctgccggtcatcgatgctgacgaggcagcacgcgccgttatgaagccaggcgaagaagcgtatcgcgacattgtagctgaattcgggccgggcatccttcgtgcggatggcgagatcgatcgccagaaactgggtgctatccgcttttcggaggaacaacaacgtaaggtgctgaattcgattgtaggtcctgcagtcctgaagaagatgctcgcggagtgggaagctcatatcgggtcaggcgccaagacggttgtgctggatatcccgctgctgttcgaatccggattgcaatcgtggatggacaaagttctcgtggtgtacgtcgatgatgatgttcagttacgccgccttatggcacgtaacgggtttactgaagaagaagctctgaagcgcattcgttcacagtggcccagtgcggagaaagttaaacgtgcagacgctgtcatcgacaataatggcaatattgaagaaacccgccgccagctgctggacattttacaccagtgggatctgctggacaaaggtggctccggccaccatcatcaccatcac

SEQ ID NO: 1696 - protein, 211 aa, synthetic construct
  REGION 1..211: note = Variant of 3'O-kinase
MAVTIGLTGGIAAGKSTVSAMMRELGLPVIDADEAARAVMKPGEEAYRDIVAEFGPGILRADGEIDRQKLGAIRFSEEQQRKVLNSIVGPAVLKKMLAEWEAHIGSGAKTVVLDIPLLFESGLQSWMDKVLVVYVDDDVQLRRLMARNGFTEEEALKRIRSQWPSAEKVKRADAVIDNNGNIEETRRQLLDILHQWDLLDKGGSGHHHHHH

SEQ ID NO: 1697 - DNA, 633 bp, synthetic construct
  misc_feature 1..633: note = Variant of 3'O-kinase
  source 1..633: mol_type = other DNA
atggcggttaccattggtttaacaggagggatcgcagcgggcaaatcgactgtgagtgccatgatgcgtgaactgggtctgccggtcatcgatgctgacgaggcagcacgcgccgttatgaagccaggcgaagaagcgtatcgcgacattgtagctgaattcgggccgggcatccttcgtgcggatggcgagatcgatcgccagaaactgggtgctatccgcttttcggacgaacaacaacgtaaggtgctgaattcgattgtaggtcctgcagtcctgaagaagatgctcgcggagtgggaagctcatatcgggtcaggcgccaagacggttgtgctggatatcccgctgctgttcgaatccggattgcaatcgtggatggacaaagttctcgtggtgtacgtcgatgatgatgttcagttacgccgccttatggcacgtaacgggtttactgaagaagaagctctgaagcgcattcgttcacagtggcccagtgcggagaaagttaaacgtgcagacgctgtcatcgacaataatggcaatattgaagaaacccgccgccagctgctggacattttaatgcagtgggatctgctggacaaaggtggctccggccaccatcatcaccatcac

SEQ ID NO: 1698 - protein, 211 aa, synthetic construct
  REGION 1..211: note = Variant of 3'O-kinase
MAVTIGLTGGIAAGKSTVSAMMRELGLPVIDADEAARAVMKPGEEAYRDIVAEFGPGILRADGEIDRQKLGAIRFSDEQQRKVLNSIVGPAVLKKMLAEWEAHIGSGAKTVVLDIPLLFESGLQSWMDKVLVVYVDDDVQLRRLMARNGFTEEEALKRIRSQWPSAEKVKRADAVIDNNGNIEETRRQLLDILMQWDLLDKGGSGHHHHHH

SEQ ID NO: 1699 - DNA, 633 bp, synthetic construct
  misc_feature 1..633: note = Variant of 3'O-kinase
  source 1..633: mol_type = other DNA
atggcggttaccattggtttaacaggagggatcgcagcgggcaaatcgactgtgagtgccatgatgcgtgaactgggtctgccggtcatcgatgctgacgaggcagcacgcgccgttatgaagccaggcgaagaagcgtatcgcgacattgtagctgaattcggggggggcatccttcgtgcggatggcgagatcgatcgccagaaactgggtgctatccgcttttcggacgaacaacaacgtaaggtgctgaattcgattgtaggtcctgcagtcctgaagaagatgctcgcggagtgggaagctcatatcgggtcaggcgccaagacggttgtgctggatatcccgctgctgttcgaatccggattgcaatcgtggatggacaaagttctcgtggtgtacgtcgatgatgatgttcagttacgccgccttatggcacgtaacgggtttactgaagaagaagctctgaagcgcattcgttcacagtggcccagtgcggagaaagttaaacgtgcagacgctgtcatcgacaataatggcaatattgaagaaacccgccgccagctgctggacattttacaccagtgggatctgctggacaaaggtggctccggccaccatcatcaccatcac

SEQ ID NO: 1700 - protein, 211 aa, synthetic construct
  REGION 1..211: note = Variant of 3'O-kinase
MAVTIGLTGGIAAGKSTVSAMMRELGLPVIDADEAARAVMKPGEEAYRDIVAEFGGGILRADGEIDRQKLGAIRFSDEQQRKVLNSIVGPAVLKKMLAEWEAHIGSGAKTVVLDIPLLFESGLQSWMDKVLVVYVDDDVQLRRLMARNGFTEEEALKRIRSQWPSAEKVKRADAVIDNNGNIEETRRQLLDILHQWDLLDKGGSGHHHHHH

SEQ ID NO: 1701 - DNA, 633 bp, synthetic construct
  misc_feature 1..633: note = Variant of 3'O-kinase
  source 1..633: mol_type = other DNA
atggcggttaccattggtttaacaggagggatcgcagcgggcaaatcgactgtgagtgccatgatgcgtgaactgggtctggaggtcatcgatgctgacgaggcagcacgcgccgttatgaagccaggcgaagaagcgtatcgcgacattgtagctgaattcgggccgggcatccttcgtgcggatggcgagatcgatcgccagaaactgggtgctatccgcttttcggacgaacaacaacgtaaggtgctgaattcgattgtaggtcctgcagtcctgaagaagatgctcgcggagtgggaagctcatatcgggtcaggcgccaagacggttgtgctggatatcccgctgctgttcgaatccggattgcaatcgtggatggacaaagttctcgtggtgtacgtcgatgatgatgttcagttacgccgccttatggcacgtaacgggtttactgaagaagaagctctgaagcgcattcgttcacagtggcccagtgcggagaaagttaaacgtgcagacgctgtcatcgacaataatggcaatattgaagaaacccgccgccagctgctggacattttacaccagtgggatctgctggacaaaggtggctccggccaccatcatcaccatcac

SEQ ID NO: 1702 - protein, 211 aa, synthetic construct
  REGION 1..211: note = Variant of 3'O-kinase
MAVTIGLTGGIAAGKSTVSAMMRELGLEVIDADEAARAVMKPGEEAYRDIVAEFGPGILRADGEIDRQKLGAIRFSDEQQRKVLNSIVGPAVLKKMLAEWEAHIGSGAKTVVLDIPLLFESGLQSWMDKVLVVYVDDDVQLRRLMARNGFTEEEALKRIRSQWPSAEKVKRADAVIDNNGNIEETRRQLLDILHQWDLLDKGGSGHHHHHH

SEQ ID NO: 1703 - DNA, 633 bp, synthetic construct
  misc_feature 1..633: note = Variant of 3'O-kinase
  source 1..633: mol_type = other DNA
atggcggttaccattggtttaacaggagggatcgcagcgggcaaatcgactgtgagtgccatgatgcgtgaactgggtctgccggtcatcgatgctgacgaggcagcacgcgccgttatgaagccaggcgaagaagcgtatcgcgacattgtagctgaattcgggccgggcatcctttcggcggatggcgagatcgatcgccagaaactgggtgctatccgcttttcggacgaacaacaacgtaaggtgctgaattcgattgtaggtcctgcagtcctgaagaagatgctcgcggagtgggaagctcatatcgggtcaggcgccaagacggttgtgctggatatcccgctgctgttcgaatccggattgcaatcgtggatggacaaagttctcgtggtgtacgtcgatgatgatgttcagttacgccgccttatggcacgtaacgggtttactgaagaagaagctctgaagcgcattcgttcacagtggcccagtgcggagaaagttaaacgtgcagacgctgtcatcgacaataatggcaatattgaagaaacccgccgccagctgctggacattttacaccagtgggatctgctggacaaaggtggctccggccaccatcatcaccatcac

SEQ ID NO: 1704 - protein, 211 aa, synthetic construct
  REGION 1..211: note = Variant of 3'O-kinase
MAVTIGLTGGIAAGKSTVSAMMRELGLPVIDADEAARAVMKPGEEAYRDIVAEFGPGILSADGEIDRQKLGAIRFSDEQQRKVLNSIVGPAVLKKMLAEWEAHIGSGAKTVVLDIPLLFESGLQSWMDKVLVVYVDDDVQLRRLMARNGFTEEEALKRIRSQWPSAEKVKRADAVIDNNGNIEETRRQLLDILHQWDLLDKGGSGHHHHHH

SEQ ID NO: 1705 - DNA, 633 bp, synthetic construct
  misc_feature 1..633: note = Variant of 3'O-kinase
  source 1..633: mol_type = other DNA
atggcggttaccattggtttaacaggagggatcgcagcgggcaaatcgactgtgagtgccatgatgcgtgaactgggtctgccggtcatcgatgctgacgaggttgcacgcgccgttatgaagccaggcgaagaagcgtatcgcgacattgtagctgaattcgggccgggcatccttcgtgcggatggcgagatcgatcgccagaaactgggtgctatccgcttttcggacgaacaacaacgtaaggtgctgaattcgattgtaggtcctgcagtcctgaagaagatgctcgcggagtgggaagctcatatcgggtcaggcgccaagacggttgtgctggatatcccgctgctgttcgaatccggattgcaatcgtggatggacaaagttctcgtggtgtacgtcgatgatgatgttcagttacgccgccttatggcacgtaacgggtttactgaagaagaagctctgaagcgcattcgttcacagtggcccagtgcggagaaagttaaacgtgcagacgctgtcatcgacaataatggcaatattgaagaaacccgccgccagctgctggacattttacaccagtgggatctgctggacaaaggtggctccggccaccatcatcaccatcac

SEQ ID NO: 1706 - protein, 211 aa, synthetic construct
  REGION 1..211: note = Variant of 3'O-kinase
MAVTIGLTGGIAAGKSTVSAMMRELGLPVIDADEVARAVMKPGEEAYRDIVAEFGPGILRADGEIDRQKLGAIRFSDEQQRKVLNSIVGPAVLKKMLAEWEAHIGSGAKTVVLDIPLLFESGLQSWMDKVLVVYVDDDVQLRRLMARNGFTEEEALKRIRSQWPSAEKVKRADAVIDNNGNIEETRRQLLDILHQWDLLDKGGSGHHHHHH

SEQ ID NO: 1707 - DNA, 633 bp, synthetic construct
  misc_feature 1..633: note = Variant of 3'O-kinase
  source 1..633: mol_type = other DNA
atggcggttaccattggtttaacaggagggatcgcagcgggcaaatcgactgtgagtgccatgatgcgtgaactgggtctgccggtcatcgatgctgacgaggcagcacgcgccgttatgaagccaggcgaagaagcgtatcgcgacattgtagctgaattcgggccgggcatccttcgtgcggatggcgagatcgatcgccagaaactgggtgctatccgcttttcgtgggaacaacaacgtaaggtgctgaattcgattgtaggtcctgcagtcctgaagaagatgctcgcggagtgggaagctcatatcgggtcaggcgccaagacggttgtgctggatatcccgctgctgttcgaatccggattgcaatcgtggatggacaaagttctcgtggtgtacgtcgatgatgatgttcagttacgccgccttatggcacgtaacgggtttactgaagaagaagctctgaagcgcattcgttcacagtggcccagtgcggagaaagttaaacgtgcagacgctgtcatcgacaataatggcaatattgaagaaacccgccgccagctgctggacattttacaccagtgggatctgctggacaaaggtggctccggccaccatcatcaccatcac

SEQ ID NO: 1708 - protein, 211 aa, synthetic construct
  REGION 1..211: note = Variant of 3'O-kinase
MAVTIGLTGGIAAGKSTVSAMMRELGLPVIDADEAARAVMKPGEEAYRDIVAEFGPGILRADGEIDRQKLGAIRFSWEQQRKVLNSIVGPAVLKKMLAEWEAHIGSGAKTVVLDIPLLFESGLQSWMDKVLVVYVDDDVQLRRLMARNGFTEEEALKRIRSQWPSAEKVKRADAVIDNNGNIEETRRQLLDILHQWDLLDKGGSGHHHHHH

SEQ ID NO: 1709 - DNA, 633 bp, synthetic construct
  misc_feature 1..633: note = Variant of 3'O-kinase
  source 1..633: mol_type = other DNA
atggcggttaccattggtttaacaggagggatcgcagcgggcaaatcgactgtgagtgccatgatgcgtgaactgggtctgccggtcatcgatgctgacgaggcagcacgcgccgttatgaagccaggcgaagaagcgtatcgcgacattgtagctgaattcgggccgggcatccttcgtgcggatggcgagatcgatcgccagaaactgggtgctatccgcttttcggacgaacaacaacgtaaggtgctggcttcgattgtaggtcctgcagtcctgaagaagatgctcgcggagtgggaagctcatatcgggtcaggcgccaagacggttgtgctggatatcccgctgctgttcgaatccggattgcaatcgtggatggacaaagttctcgtggtgtacgtcgatgatgatgttcagttacgccgccttatggcacgtaacgggtttactgaagaagaagctctgaagcgcattcgttcacagtggcccagtgcggagaaagttaaacgtgcagacgctgtcatcgacaataatggcaatattgaagaaacccgccgccagctgctggacattttacaccagtgggatctgctggacaaaggtggctccggccaccatcatcaccatcac

SEQ ID NO: 1710 - protein, 211 aa, synthetic construct
  REGION 1..211: note = Variant of 3'O-kinase
MAVTIGLTGGIAAGKSTVSAMMRELGLPVIDADEAARAVMKPGEEAYRDIVAEFGPGILRADGEIDRQKLGAIRFSDEQQRKVLASIVGPAVLKKMLAEWEAHIGSGAKTVVLDIPLLFESGLQSWMDKVLVVYVDDDVQLRRLMARNGFTEEEALKRIRSQWPSAEKVKRADAVIDNNGNIEETRRQLLDILHQWDLLDKGGSGHHHHHH

SEQ ID NO: 1711 - DNA, 633 bp, synthetic construct
  misc_feature 1..633: note = Variant of 3'O-kinase
  source 1..633: mol_type = other DNA
atggcggttcagattggtttaacaggagggatcgcagcgggcaaatcgactgtgagtgccatgatgcgtgaactgggtctgccggtcatcgatgctgacgaggcagcacgcgccgttatgaagccaggcgaagaagcgtatcgcgacattgtagctgaattcgggccgggcatccttcgtgcggatggcgagatcgatcgccagaaactgggtgctatccgcttttcggacgaacaacaacgtaaggtgctgaattcgattgtaggtcctgcagtcctgaagaagatgctcgcggagtgggaagctcatatcgggtcaggcgccaagacggttgtgctggatatcccgctgctgttcgaatccggattgcaatcgtggatggacaaagttctcgtggtgtacgtcgatgatgatgttcagttacgccgccttatggcacgtaacgggtttactgaagaagaagctctgaagcgcattcgttcacagtggcccagtgcggagaaagttaaacgtgcagacgctgtcatcgacaataatggcaatattgaagaaacccgccgccagctgctggacattttacaccagtgggatctgctggacaaaggtggctccggccaccatcatcaccatcac

SEQ ID NO: 1712 - protein, 211 aa, synthetic construct
  REGION 1..211: note = Variant of 3'O-kinase
MAVQIGLTGGIAAGKSTVSAMMRELGLPVIDADEAARAVMKPGEEAYRDIVAEFGPGILRADGEIDRQKLGAIRFSDEQQRKVLNSIVGPAVLKKMLAEWEAHIGSGAKTVVLDIPLLFESGLQSWMDKVLVVYVDDDVQLRRLMARNGFTEEEALKRIRSQWPSAEKVKRADAVIDNNGNIEETRRQLLDILHQWDLLDKGGSGHHHHHH

SEQ ID NO: 1713 - DNA, 633 bp, synthetic construct
  misc_feature 1..633: note = Variant of 3'O-kinase
  source 1..633: mol_type = other DNA
atggcggttaccattggtttaacaggagggatcgcagcgggcaaatcgactgtgagtgccatgatgcgtgaactgggtctgccggtcatcgatgctgacgaggcagcacgcgccgttatgaagccaggcgaagaagcgtatcgcgacattgtagctgaattcgggccgggcatccttcgtgcggatggcgagatcgatcgccagaaactgggtgctatccgcttttcggacgaacaacaacgtaaggtgctgaattcgattgtaggtcctgcagtcctgaagaagatgctcgcggagtgggaagctcatatcgggtcaggcgccaagacggttgtgctggatatcccgctgctgttcgaatccggattgcaatcgtggatggacaaagttctcgtggtgtacgtcgatgatgatgttcagttacgccgccttatggcacgtaacgggtttactgaagaagaagctctgaagcgcattcgttcacagtggcccagtgcggagaaagttaaacgtgcaccggctgtcatcgacaataatggcaatattgaagaaacccgccgccagctgctggacattttacaccagtgggatctgctggacaaaggtggctccggccaccatcatcaccatcac

SEQ ID NO: 1714 - protein, 211 aa, synthetic construct
  REGION 1..211: note = Variant of 3'O-kinase
MAVTIGLTGGIAAGKSTVSAMMRELGLPVIDADEAARAVMKPGEEAYRDIVAEFGPGILRADGEIDRQKLGAIRFSDEQQRKVLNSIVGPAVLKKMLAEWEAHIGSGAKTVVLDIPLLFESGLQSWMDKVLVVYVDDDVQLRRLMARNGFTEEEALKRIRSQWPSAEKVKRAPAVIDNNGNIEETRRQLLDILHQWDLLDKGGSGHHHHHH

SEQ ID NO: 1715 - DNA, 633 bp, synthetic construct
  misc_feature 1..633: note = Variant of 3'O-kinase
  source 1..633: mol_type = other DNA
atggcggttaccattggtttaacaggagggatcgcagcgggcaaatcgactgtgagtgccatgatgcgtgaactgggtctgccggtcatcgatgctgacgaggcagcacgcgccgttatgaagccaggcgaagaagcgtatcgcgacattgtagctgaattcgggccgggcatccttcgtgcggatggcgagatcgatcgccagaaactgggtgctatccgcttttcggacgaacaacaacgtaaggtgctgaatcagattgtaggtcctgcagtcctgaagaagatgctcgcggagtgggaagctcatatcgggtcaggcgccaagacggttgtgctggatatcccgctgctgttcgaatccggattgcaatcgtggatggacaaagttctcgtggtgtacgtcgatgatgatgttcagttacgccgccttatggcacgtaacgggtttactgaagaagaagctctgaagcgcattcgttcacagtggcccagtgcggagaaagttaaacgtgcagacgctgtcatcgacaataatggcaatattgaagaaacccgccgccagctgctggacattttacaccagtgggatctgctggacaaaggtggctccggccaccatcatcaccatcac

SEQ ID NO: 1716 - protein, 211 aa, synthetic construct
  REGION 1..211: note = Variant of 3'O-kinase
MAVTIGLTGGIAAGKSTVSAMMRELGLPVIDADEAARAVMKPGEEAYRDIVAEFGPGILRADGEIDRQKLGAIRFSDEQQRKVLNQIVGPAVLKKMLAEWEAHIGSGAKTVVLDIPLLFESGLQSWMDKVLVVYVDDDVQLRRLMARNGFTEEEALKRIRSQWPSAEKVKRADAVIDNNGNIEETRRQLLDILHQWDLLDKGGSGHHHHHH

SEQ ID NO: 1717 - DNA, 633 bp, synthetic construct
  misc_feature 1..633: note = Variant of 3'O-kinase
  source 1..633: mol_type = other DNA
atggcggttaccattggtttaacaggagggatcgcagcgggcaaatcgactgtgagtgccatgatgcgtgaactgggtctgccggtcatcgatgctgacgaggcagcacgcgccgttatgaagccaggcgaagaagcgtatcgcgacattgtagctgaattcgggccgggcatccttcgtgaggatggcgagatcgatcgccagaaactgggtgctatccgcttttcggacgaacaacaacgtaaggtgctgaattcgattgtaggtcctgcagtcctgaagaagatgctcgcggagtgggaagctcatatcgggtcaggcgccaagacggttgtgctggatatcccgctgctgttcgaatccggattgcaatcgtggatggacaaagttctcgtggtgtacgtcgatgatgatgttcagttacgccgccttatggcacgtaacgggtttactgaagaagaagctctgaagcgcattcgttcacagtggcccagtgcggagaaagttaaacgtgcagacgctgtcatcgacaataatggcaatattgaagaaacccgccgccagctgctggacattttacaccagtgggatctgctggacaaaggtggctccggccaccatcatcaccatcac

SEQ ID NO: 1718 - protein, 211 aa, synthetic construct
  REGION 1..211: note = Variant of 3'O-kinase
MAVTIGLTGGIAAGKSTVSAMMRELGLPVIDADEAARAVMKPGEEAYRDIVAEFGPGILREDGEIDRQKLGAIRFSDEQQRKVLNSIVGPAVLKKMLAEWEAHIGSGAKTVVLDIPLLFESGLQSWMDKVLVVYVDDDVQLRRLMARNGFTEEEALKRIRSQWPSAEKVKRADAVIDNNGNIEETRRQLLDILHQWDLLDKGGSGHHHHHH

SEQ ID NO: 1719 - DNA, 633 bp, synthetic construct
  misc_feature 1..633: note = Variant of 3'O-kinase
  source 1..633: mol_type = other DNA
atggcggttaccattggtttaacaggagggatcgcagcgggcaaatcgactgtgagtgccatgatgcgtgaactgggtctgccggtcatcgatgctgacgaggcagcacgcgccgttatgaagccaggcgaagaagcgtatcgcgacattgtagctgaattcgggccgggcatccttcgtgcggatggcgagatcgatcgccagaaactgggtgctatccgcttttcggacgaacaacaacgtaaggtgctgaattcgattgtaggtcctgcagtcctgaagaagatgctcgcggagtgggaagctcatatcgggtcaggcgccaagacggttgtgctggatatcccgctgctgttcgaatccggattgcaatcgtggatggacaaagttctcgtggtgtacgtcgatgatgatgttcagttacgccgccttatggcacgtaacgggtttactgaagaagaagctctgaagcgcattcgttcacagtggcccagtgcggagaaagttaaacgtgcagacgctgtcatcgacaataatggcaatattgaagaaacccgccgccagctgctggacattttacacaagtgggatctgctggacaaaggtggctccggccaccatcatcaccatcac

SEQ ID NO: 1720 - protein, 211 aa, synthetic construct
  REGION 1..211: note = Variant of 3'O-kinase
MAVTIGLTGGIAAGKSTVSAMMRELGLPVIDADEAARAVMKPGEEAYRDIVAEFGPGILRADGEIDRQKLGAIRFSDEQQRKVLNSIVGPAVLKKMLAEWEAHIGSGAKTVVLDIPLLFESGLQSWMDKVLVVYVDDDVQLRRLMARNGFTEEEALKRIRSQWPSAEKVKRADAVIDNNGNIEETRRQLLDILHKWDLLDKGGSGHHHHHH

SEQ ID NO: 1721 - DNA, 633 bp, synthetic construct
  misc_feature 1..633: note = Variant of 3'O-kinase
  source 1..633: mol_type = other DNA
atggcggttaccattggtttaacaggagggatcgcagcgggcaaatcgactgtgactgccatgatgcgtgaactgggtctgccggtcatcgatgctgacgaggcagcacgcgccgttatgaagccaggcgaagaagcgtatcgcgacattgtagctgaattcgggccgggcatccttcgtgcggatggcgagatcgatcgccagaaactgggtgctatccgcttttcggacgaacaacaacgtaaggtgctgaattcgattgtaggtcctgcagtcctgaagaagatgctcgcggagtgggaagctcatatcgggtcaggcgccaagacggttgtgctggatatcccgctgctgttcgaatccggattgcaatcgtggatggacaaagttctcgtggtgtacgtcgatgatgatgttcagttacgccgccttatggcacgtaacgggtttactgaagaagaagctctgaagcgcattcgttcacagtggcccagtgcggagaaagttaaacgtgcagacgctgtcatcgacaataatggcaatattgaagaaacccgccgccagctgctggacattttacaccagtgggatctgctggacaaaggtggctccggccaccatcatcaccatcac

SEQ ID NO: 1722 - protein, 211 aa, synthetic construct
  REGION 1..211: note = Variant of 3'O-kinase
MAVTIGLTGGIAAGKSTVTAMMRELGLPVIDADEAARAVMKPGEEAYRDIVAEFGPGILRADGEIDRQKLGAIRFSDEQQRKVLNSIVGPAVLKKMLAEWEAHIGSGAKTVVLDIPLLFESGLQSWMDKVLVVYVDDDVQLRRLMARNGFTEEEALKRIRSQWPSAEKVKRADAVIDNNGNIEETRRQLLDILHQWDLLDKGGSGHHHHHH

SEQ ID NO: 1723 - DNA, 633 bp, synthetic construct
  misc_feature 1..633: note = Variant of 3'O-kinase
  source 1..633: mol_type = other DNA
atggcggttaccattggtttaacaggagggatcgcagcgggcaaatcgactgtgagtgccatgatgcgtgaactgggtctgccggtcatcgatgctgacgagtgtgcacgcgccgttatgaagccaggcgaagaagcgtatcgcgacattgtagctgaattcgggccgggcatccttcgtgcggatggcgagatcgatcgccagaaactgggtgctatccgcttttcggacgaacaacaacgtaaggtgctgaattcgattgtaggtcctgcagtcctgaagaagatgctcgcggagtgggaagctcatatcgggtcaggcgccaagacggttgtgctggatatcccgctgctgttcgaatccggattgcaatcgtggatggacaaagttctcgtggtgtacgtcgatgatgatgttcagttacgccgccttatggcacgtaacgggtttactgaagaagaagctctgaagcgcattcgttcacagtggcccagtgcggagaaagttaaacgtgcagacgctgtcatcgacaataatggcaatattgaagaaacccgccgccagctgctggacattttacaccagtgggatctgctggacaaaggtggctccggccaccatcatcaccatcac

SEQ ID NO: 1724 - protein, 211 aa, synthetic construct
  REGION 1..211: note = Variant of 3'O-kinase
MAVTIGLTGGIAAGKSTVSAMMRELGLPVIDADECARAVMKPGEEAYRDIVAEFGPGILRADGEIDRQKLGAIRFSDEQQRKVLNSIVGPAVLKKMLAEWEAHIGSGAKTVVLDIPLLFESGLQSWMDKVLVVYVDDDVQLRRLMARNGFTEEEALKRIRSQWPSAEKVKRADAVIDNNGNIEETRRQLLDILHQWDLLDKGGSGHHHHHH

SEQ ID NO: 1725 - DNA, 633 bp, synthetic construct
  misc_feature 1..633: note = Variant of 3'O-kinase
  source 1..633: mol_type = other DNA
atggcggttaccattggtttaacaggagggatcgcagcgggcaaatcgactgtgagtgccatgatgcgtgaactgggtctgccggtcatcgatgctgacgaggcagcacgcgccgttatgaagccaggcgaagaagcgtatcgcgacattgtagctaagttcgggccgggcatccttcgtgcggatggcgagatcgatcgccagaaactgggtgctatccgcttttcggacgaacaacaacgtaaggtgctgaattcgattgtaggtcctgcagtcctgaagaagatgctcgcggagtgggaagctcatatcgggtcaggcgccaagacggttgtgctggatatcccgctgctgttcgaatccggattgcaatcgtggatggacaaagttctcgtggtgtacgtcgatgatgatgttcagttacgccgccttatggcacgtaacgggtttactgaagaagaagctctgaagcgcattcgttcacagtggcccagtgcggagaaagttaaacgtgcagacgctgtcatcgacaataatggcaatattgaagaaacccgccgccagctgctggacattttacaccagtgggatctgctggacaaaggtggctccggccaccatcatcaccatcac

SEQ ID NO: 1726 - protein, 211 aa, synthetic construct
  REGION 1..211: note = Variant of 3'O-kinase
MAVTIGLTGGIAAGKSTVSAMMRELGLPVIDADEAARAVMKPGEEAYRDIVAKFGPGILRADGEIDRQKLGAIRFSDEQQRKVLNSIVGPAVLKKMLAEWEAHIGSGAKTVVLDIPLLFESGLQSWMDKVLVVYVDDDVQLRRLMARNGFTEEEALKRIRSQWPSAEKVKRADAVIDNNGNIEETRRQLLDILHQWDLLDKGGSGHHHHHH

SEQ ID NO: 1727 - DNA, 633 bp, synthetic construct
  misc_feature 1..633: note = Variant of 3'O-kinase
  source 1..633: mol_type = other DNA
atggcggttaccattggtttaacaggagggatcgcagcgggcaaatcgactgtgagtgccatgatgcgtgaactgggtctgccggtcatcgatgctgacgaggcagcacgcgccgttatgaagccaggcgaagaagcgtatcgcgacattgtagctgaattcgggccgggcatccttcgtgcggatggcgagatcgatcgccagaaactgggtgctatccgcttttcggaccctcaacaacgtaaggtgctgaattcgattgtaggtcctgcagtcctgaagaagatgctcgcggagtgggaagctcatatcgggtcaggcgccaagacggttgtgctggatatcccgctgctgttcgaatccggattgcaatcgtggatggacaaagttctcgtggtgtacgtcgatgatgatgttcagttacgccgccttatggcacgtaacgggtttactgaagaagaagctctgaagcgcattcgttcacagtggcccagtgcggagaaagttaaacgtgcagacgctgtcatcgacaataatggcaatattgaagaaacccgccgccagctgctggacattttacaccagtgggatctgctggacaaaggtggctccggccaccatcatcaccatcac

SEQ ID NO: 1728 - protein, 211 aa, synthetic construct
  REGION 1..211: note = Variant of 3'O-kinase
MAVTIGLTGGIAAGKSTVSAMMRELGLPVIDADEAARAVMKPGEEAYRDIVAEFGPGILRADGEIDRQKLGAIRFSDPQQRKVLNSIVGPAVLKKMLAEWEAHIGSGAKTVVLDIPLLFESGLQSWMDKVLVVYVDDDVQLRRLMARNGFTEEEALKRIRSQWPSAEKVKRADAVIDNNGNIEETRRQLLDILHQWDLLDKGGSGHHHHHH

SEQ ID NO: 1729 - DNA, 633 bp, synthetic construct
  misc_feature 1..633: note = Variant of 3'O-kinase
  source 1..633: mol_type = other DNA
atggcggttaccattggtttaacaggagggatcgcagcgggcaaatcgactgtgagtgccatgatgcgtgaactgggtctgccggtcatcgatgctgacgaggcagcacgcgccgttatgaagccaggcgaagaagcgtatcgcgacattgtagctgaattcgggccgggcatccttcgtgcggatggcgagatcgatcgccagaaactgggtgctatccgcttttcggacgaacaacaacgtaaggtgctgaattcgattgtaggtcctgcagtcctgaagaagatgctcgcggagtgggaagctcatatcgggtcaggcgccaagacggttgtgctggatatcccgctgctgttcgaatccggattgcaatcgtggatggacaaagttctcgtggtgtacgtcgatgatgatgttcagttacgccgccttatggcacgtaacgggtttactgaagaagaagctctgaagcgcattcgttcacagtggcccagtgcggagaaagttaaacgtgcagacgctgtcatcgacaataatggcaatattgaagaaacccgccgccagctgctggacattttacacgcgtgggatctgctggacaaaggtggctccggccaccatcatcaccatcac

SEQ ID NO: 1730 - protein, 211 aa, synthetic construct
  REGION 1..211: note = Variant of 3'O-kinase
MAVTIGLTGGIAAGKSTVSAMMRELGLPVIDADEAARAVMKPGEEAYRDIVAEFGPGILRADGEIDRQKLGAIRFSDEQQRKVLNSIVGPAVLKKMLAEWEAHIGSGAKTVVLDIPLLFESGLQSWMDKVLVVYVDDDVQLRRLMARNGFTEEEALKRIRSQWPSAEKVKRADAVIDNNGNIEETRRQLLDILHAWDLLDKGGSGHHHHHH

SEQ ID NO: 1731 - DNA, 633 bp, synthetic construct
  misc_feature 1..633: note = Variant of 3'O-kinase
  source 1..633: mol_type = other DNA
atggcggttaccattggtttaacaggagggatcgcagcgggcaaatcgactgtgagtgccatgatgcgtgaactgggtctgccggtcatcgatgctgacgaggcagcacgcgccgttatgaagccaggcgaacaggcgtatcgcgacattgtagctgaattcgggccgggcatccttcgtgcggatggcgagatcgatcgccagaaactgggtgctatccgcttttcggacgaacaacaacgtaaggtgctgaattcgattgtaggtcctgcagtcctgaagaagatgctcgcggagtgggaagctcatatcgggtcaggcgccaagacggttgtgctggatatcccgctgctgttcgaatccggattgcaatcgtggatggacaaagttctcgtggtgtacgtcgatgatgatgttcagttacgccgccttatggcacgtaacgggtttactgaagaagaagctctgaagcgcattcgttcacagtggcccagtgcggagaaagttaaacgtgcagacgctgtcatcgacaataatggcaatattgaagaaacccgccgccagctgctggacattttacaccagtgggatctgctggacaaaggtggctccggccaccatcatcaccatcac

SEQ ID NO: 1732 - protein, 211 aa, synthetic construct
  REGION 1..211: note = Variant of 3'O-kinase
MAVTIGLTGGIAAGKSTVSAMMRELGLPVIDADEAARAVMKPGEQAYRDIVAEFGPGILRADGEIDRQKLGAIRFSDEQQRKVLNSIVGPAVLKKMLAEWEAHIGSGAKTVVLDIPLLFESGLQSWMDKVLVVYVDDDVQLRRLMARNGFTEEEALKRIRSQWPSAEKVKRADAVIDNNGNIEETRRQLLDILHQWDLLDKGGSGHHHHHH

SEQ ID NO: 1733 - DNA, 633 bp, synthetic construct
  misc_feature 1..633: note = Variant of 3'O-kinase
  source 1..633: mol_type = other DNA
atggcggttaccattggtttaacaggagggatcgcagcgggcaaatcgactgtgagtgccatgatgcgtgaactgggtctgccggtcatcgatgctgacgaggcagcacgcgccgttatgaagccaggcgaagaagcgtatcgcgacattgtagctgaattcgggccgggcatccttcgtgcggatggcgagatcgatcgccagaaactgggtgctatccgcttttcggacgaacaacaacgtaaggtgctgaattcgattgtaggtcctgcagtcctgaagaagatgctcgcggagtgggaagctcatatcgggtcaggcgccaagacggttgtgctggatatcccgctgctgttcgaatccggattgcaatcgtggatggacaaagttctcgtggtgtacgtcgatgatgatgttcagttacgccgccttatggcacgtaacgggtttactgaagaagaagctctgaagcgcattcgttcacagtggcccagtgcggagaaagttaaacgtgcagacgctgtcatcgacaataatggcaatattgaagaaacccgccgccagctgctggacattttagcgcagtgggatctgctggacaaaggtggctccggccaccatcatcaccatcac

SEQ ID NO: 1734 - protein, 211 aa, synthetic construct
  REGION 1..211: note = Variant of 3'O-kinase
MAVTIGLTGGIAAGKSTVSAMMRELGLPVIDADEAARAVMKPGEEAYRDIVAEFGPGILRADGEIDRQKLGAIRFSDEQQRKVLNSIVGPAVLKKMLAEWEAHIGSGAKTVVLDIPLLFESGLQSWMDKVLVVYVDDDVQLRRLMARNGFTEEEALKRIRSQWPSAEKVKRADAVIDNNGNIEETRRQLLDILAQWDLLDKGGSGHHHHHH

SEQ ID NO: 1735 - DNA, 633 bp, synthetic construct
  misc_feature 1..633: note = Variant of 3'O-kinase
  source 1..633: mol_type = other DNA
atggcggttaccattggtttaacaggagggatcgcagcgggcaaatcgactgtgagtgccatgatgcgtgaactgggtctgccggtcatcgatgctgacgaggcagcacgcgccgttatgaagccaggcgaagaagcgtatcgcgacattgtagctgaattcgggccgggcatccttcgtgcggatggcgagatcgatcgccagaaactgggtgctatccgcttttcggacgaacaacaacgtaaggtgctgaattcgattgtaggtcctgcagtcctgaagaagatgctcgcggagtgggaagctcatatcgggtcaggcgccaagacggttgtgctggatatcccgctgctgttcgaatccggattgcaatcgtggatggacaaagttctcgtggtgtacgtcgatgatgatgttcagttacgccgccttatggcacgtaacgggtttactgaagaagaagctctgaagcgcattcgttcacagtggcccagtgcggagaaagtttgtcgtgcagacgctgtcatcgacaataatggcaatattgaagaaacccgccgccagctgctggacattttacaccagtgggatctgctggacaaaggtggctccggccaccatcatcaccatcac

SEQ ID NO: 1736 - protein, 211 aa, synthetic construct
  REGION 1..211: note = Variant of 3'O-kinase
MAVTIGLTGGIAAGKSTVSAMMRELGLPVIDADEAARAVMKPGEEAYRDIVAEFGPGILRADGEIDRQKLGAIRFSDEQQRKVLNSIVGPAVLKKMLAEWEAHIGSGAKTVVLDIPLLFESGLQSWMDKVLVVYVDDDVQLRRLMARNGFTEEEALKRIRSQWPSAEKVCRADAVIDNNGNIEETRRQLLDILHQWDLLDKGGSGHHHHHH

SEQ ID NO: 1737 - DNA, 633 bp, synthetic construct
  misc_feature 1..633: note = Variant of 3'O-kinase
  source 1..633: mol_type = other DNA
atggcggttaccattggtttaacaggagggatcgcagcgggcaaatcgactgtgagtgccatgatgcgtgaactgggtctgccggtcatcgatgctgacgaggcagcacgcgccgttatgaagccaggcgaagaagcgtatggggacattgtagctgaattcgggccgggcatccttcgtgcggatggcgagatcgatcgccagaaactaggtgctatccgcttttcggacgaacaacaacgtaaggtgctgaattcgattgtaggtcctgcagtcctgaagaagatgctcgcggagtgggaagctcatatcgggtcaggcgccaagacggttgtgctggatatcccgctgctgttcgaatccggattgcaatcgtggatggacaaagttctcgtggtgtacgtcgatgatgatgttcagttacgccgccttatggcacgtaacgggtttactgaagaagaagctctgaagcgcattcgttcacagtggcccagtgcggagaaagttaaacgtgcagacgctgtcatcgacaataatggcaatattgaagaaacccgccgccagctgctggacattttacaccagtgggatctgctggacaaaggtggctccggccaccatcatcaccatcac

SEQ ID NO: 1738 - protein, 211 aa, synthetic construct
  REGION 1..211: note = Variant of 3'O-kinase
MAVTIGLTGGIAAGKSTVSAMMRELGLPVIDADEAARAVMKPGEEAYGDIVAEFGPGILRADGEIDRQKLGAIRFSDEQQRKVLNSIVGPAVLKKMLAEWEAHIGSGAKTVVLDIPLLFESGLQSWMDKVLVVYVDDDVQLRRLMARNGFTEEEALKRIRSQWPSAEKVKRADAVIDNNGNIEETRRQLLDILHQWDLLDKGGSGHHHHHH

SEQ ID NO: 1739 - DNA, 633 bp, synthetic construct
  misc_feature 1..633: note = Variant of 3'O-kinase
  source 1..633: mol_type = other DNA
atggcggttaccattggtttaacaggagggatcgcagcgggcaaatcgactgtgagtgccatgatgcgtgaactgggtctgccggtcatcgatgctgacgaggcagcacgcgccgttatgaagccaggcgaagaagcgtataaggacattgtagctgaattcgggccgggcatccttcgtgcggatggcgagatcgatcgccagaaactgggtgctatccgcttttcggacgaacaacaacgtaaggtgctgaattcgattgtaggtcctgcagtcctgaagaagatgctcgcggagtgggaagctcatatcgggtcaggcgccaagacggttgtgctggatatcccgctgctgttcgaatccggattgcaatcgtggatggacaaagttctcgtggtgtacgtcgatgatgatgttcagttacgccgccttatggcacgtaacgggtttactgaagaagaagctctgaagcgcattcgttcacagtggcccagtgcggagaaagttaaacgtgcagacgctgtcatcgacaataatggcaatattgaagaaacccgccgccagctgctggacattttacaccagtgggatctgctggacaaaggtggctccggccaccatcatcaccatcac

SEQ ID NO: 1740 - protein, 211 aa, synthetic construct
  REGION 1..211: note = Variant of 3'O-kinase
MAVTIGLTGGIAAGKSTVSAMMRELGLPVIDADEAARAVMKPGEEAYKDIVAEFGPGILRADGEIDRQKLGAIRFSDEQQRKVLNSIVGPAVLKKMLAEWEAHIGSGAKTVVLDIPLLFESGLQSWMDKVLVVYVDDDVQLRRLMARNGFTEEEALKRIRSQWPSAEKVKRADAVIDNNGNIEETRRQLLDILHQWDLLDKGGSGHHHHHH

SEQ ID NO: 1741 - DNA, 633 bp, synthetic construct
  misc_feature 1..633: note = Variant of 3'O-kinase
  source 1..633: mol_type = other DNA
atggcggttaccattggtttaacaggagggatcgcagcgggcaaatcgactgtgagtgccatgatgcgtgaactgggtctgccggtcatcgatgctgacgaggcagcacgcgccgttatgaagccaggcgaagaagcgtatcgcgacattgtagctgaattcgggccgggcatccttcgtgcggatggcgagatcgatcgccagaaactgggtgctatccgcttttcggacgaacaacaacgtaaggtgctgaattcgattgtaggtcctgcagtcctgaagaagatgctcgcggagtgggaagctcatatcgggtcaggcgccaagacggttgtgctggatatcccgctgctgttcgaatccggattgcaatcgtggatggacaaagttctcgtggtgtacgtcgatgatgatgttcagttacgccgccttatggcacgtaacgggtttactgaagaagaagctctgaagcgcattcgttcacagtggcccagtgcggagaaagttaaaatggcagacgctgtcatcgacaataatggcaatattgaagaaacccgccgccagctgctggacattttacaccagtgggatctgctggacaaaggtggctccggccaccatcatcaccatcac

SEQ ID NO: 1742 - protein, 211 aa, synthetic construct
  REGION 1..211: note = Variant of 3'O-kinase
MAVTIGLTGGIAAGKSTVSAMMRELGLPVIDADEAARAVMKPGEEAYRDIVAEFGPGILRADGEIDRQKLGAIRFSDEQQRKVLNSIVGPAVLKKMLAEWEAHIGSGAKTVVLDIPLLFESGLQSWMDKVLVVYVDDDVQLRRLMARNGFTEEEALKRIRSQWPSAEKVKMADAVIDNNGNIEETRRQLLDILHQWDLLDKGGSGHHHHHH

SEQ ID NO: 1743 - DNA, 633 bp, synthetic construct
  misc_feature 1..633: note = Variant of 3'O-kinase
  source 1..633: mol_type = other DNA
atggcggttaccattggtttaacaggagggatcgcagcgggcaaatcgactgtgagtgccatgatgcgtgaactgggtctgccggtcatcgatgctgacgaggcagcacgcgccgttatgaagccaggcgaagaagcgtatcgcgacattgtagctgaattcgggccgggcatccttcgtgcggatggcgagatcgatcgccagaaactgggtgctatccgcttttcggacgaacaacaacgtaagacgctgaattcgattgtaggtcctgcagtcctgaagaagatgctcgcggagtgggaagctcatatcgggtcaggcgccaagacggttgtgctggatatcccgctgctgttcgaatccggattgcaatcgtggatggacaaagttctcgtggtgtacgtcgatgatgatgttcagttacgccgccttatggcacgtaacgggtttactgaagaagaagctctgaagcgcattcgttcacagtggcccagtgcggagaaagttaaacgtgcagacgctgtcatcgacaataatggcaatattgaagaaacccgccgccagctgctggacattttacaccagtgggatctgctggacaaaggtggctccggccaccatcatcaccatcac

SEQ ID NO: 1744 - protein, 211 aa, synthetic construct
  REGION 1..211: note = Variant of 3'O-kinase
MAVTIGLTGGIAAGKSTVSAMMRELGLPVIDADEAARAVMKPGEEAYRDIVAEFGPGILRADGEIDRQKLGAIRFSDEQQRKTLNSIVGPAVLKKMLAEWEAHIGSGAKTVVLDIPLLFESGLQSWMDKVLVVYVDDDVQLRRLMARNGFTEEEALKRIRSQWPSAEKVKRADAVIDNNGNIEETRRQLLDILHQWDLLDKGGSGHHHHHH

SEQ ID NO: 1745 - DNA, 633 bp, synthetic construct
  misc_feature 1..633: note = Variant of 3'O-kinase
  source 1..633: mol_type = other DNA
atggcggttaccattggtttaacaggagggatcgcagcgggcaaatcgactgtgagtgccatgatgcgtgaactgggtctgccggtcatcgatgctgacgaggcagcacgcgccgttatgaagccaggcgaagaagcgtatcgcgacattgtagctgaattcgggccgggcatccttcgtgcggatggcgagatcgatcgccagaaactgggtgctatccgcttttcggacgaacaacaacgtaaggtgctgaattcgattgtaggtcctgcagtcctgaagaagatgctcgcggagtgggaagctcatatcgggtcaggcgccaagacggttgtgctggatatcccgctgctgttcgaatccggattgcaatcgtggatggacaaagttctcgtggtgtacgtcgatgatgatgttcagttacgccgccttatggcacgtaacgggtttactgaagaagaagctctgaagcgcattcgttcacagtggcccagtgcggagaaagttaaagcggcagacgctgtcatcgacaataatggcaatattgaagaaacccgccgccagctgctggacattttacaccagtgggatctgctggacaaaggtggctccggccaccatcatcaccatcac

SEQ ID NO: 1746 - protein, 211 aa, synthetic construct
  REGION 1..211: note = Variant of 3'O-kinase
MAVTIGLTGGIAAGKSTVSAMMRELGLPVIDADEAARAVMKPGEEAYRDIVAEFGPGILRADGEIDRQKLGAIRFSDEQQRKVLNSIVGPAVLKKMLAEWEAHIGSGAKTVVLDIPLLFESGLQSWMDKVLVVYVDDDVQLRRLMARNGFTEEEALKRIRSQWPSAEKVKAADAVIDNNGNIEETRRQLLDILHQWDLLDKGGSGHHHHHH

SEQ ID NO: 1747 - DNA, 633 bp, synthetic construct
  misc_feature 1..633: note = Variant of 3'O-kinase
  source 1..633: mol_type = other DNA
atggcggttaccattggtttaacaggagggatcgcagcgggcaaatcgactgtgagtgccatgatgcgtgaactgggtctgccggtcatcgatgctgacgaggcagcacgcgccgttatgaagccaggcgaagaagcgtatcgcgacattgtagctgaattcgggccgggcatccttcgtgcggatggcgagatcgatcgccagaaactgggtgctatccgcttttcggacgaacaacaacgtaaggtgctgaattcgattgtaggtcctgcagtcctgaagaagatgctcgcggagtgggaagctcatatcgggtcaggcgccaagacggttgtgctggatatcccgctgctgttcgaaacgggattgcaatcgtggatggacaaagttctcgtggtgtacgtcgatgatgatgttcagttacgccgccttatggcacgtaacgggtttactgaagaagaagctctgaagcgcattcgttcacagtggcccagtgcggagaaagttaaacgtgcagacgctgtcatcgacaataatggcaatattgaagaaacccgccgccagctgctggacattttacaccagtgggatctgctggacaaaggtggctccggccaccatcatcaccatcac

SEQ ID NO: 1748 - protein, 211 aa, synthetic construct
  REGION 1..211: note = Variant of 3'O-kinase
MAVTIGLTGGIAAGKSTVSAMMRELGLPVIDADEAARAVMKPGEEAYRDIVAEFGPGILRADGEIDRQKLGAIRFSDEQQRKVLNSIVGPAVLKKMLAEWEAHIGSGAKTVVLDIPLLFETGLQSWMDKVLVVYVDDDVQLRRLMARNGFTEEEALKRIRSQWPSAEKVKRADAVIDNNGNIEETRRQLLDILHQWDLLDKGGSGHHHHHH

SEQ ID NO: 1749 - DNA, 633 bp, synthetic construct
  misc_feature 1..633: note = Variant of 3'O-kinase
  source 1..633: mol_type = other DNA
atggcggttaccattggtttaacaggagggatcgcagcgggcaaatcgactgtgagtgccatgatgcgtgaactgggtctgccggtcatcgatgctgacgaggcagcacgcgccgttatgaagccaggcgaagaagcgtatcgcgacattgtagctgaattcgggccgggcatccttcgtgcggatggcgagatcgatcgccagaaactgggtgctatccgcttttcggacgaacaagggcgtaaggtgctgaattcgattgtaggtcctgcagtcctgaagaagatgctcgcggagtgggaagctcatatcgggtcaggcgccaagacggttgtgctggatatcccgctgctgttcgaatccggattgcaatcgtggatggacaaagttctcgtggtgtacgtcgatgatgatgttcagttacgccgccttatggcacgtaacgggtttactgaagaagaagctctgaagcgcattcgttcacagtggcccagtgcggagaaagttaaacgtgcagacgctgtcatcgacaataatggcaatattgaagaaacccgccgccagctgctggacattttacaccagtgggatctgctggacaaaggtggctccggccaccatcatcaccatcac

SEQ ID NO: 1750 - protein, 211 aa, synthetic construct
  REGION 1..211: note = Variant of 3'O-kinase
MAVTIGLTGGIAAGKSTVSAMMRELGLPVIDADEAARAVMKPGEEAYRDIVAEFGPGILRADGEIDRQKLGAIRFSDEQGRKVLNSIVGPAVLKKMLAEWEAHIGSGAKTVVLDIPLLFESGLQSWMDKVLVVYVDDDVQLRRLMARNGFTEEEALKRIRSQWPSAEKVKRADAVIDNNGNIEETRRQLLDILHQWDLLDKGGSGHHHHHH

SEQ ID NO: 1751 - DNA, 633 bp, synthetic construct
  misc_feature 1..633: note = Variant of 3'O-kinase
  source 1..633: mol_type = other DNA
atggcggttaccattggtttaacaggagggatcgcagcgggcaaatcgactgtgagtgccatgatgcgtgaactgggtctgccggtcatcgatgctgacgaggcagcacgcgccgttatgaagccaggcgaagaagcgtatcgcgacattgtagctgaattcgggccgggcatccttcgtgcggatggcgagatcgatcgccagaaactgggtgctatccgcttttcggacgaacaacaacgtaaggtgctgaattcgattgtaggtcctgcagtcctgaagaagatgctcgcggagtgggaagctcatatcgggtcaggcgccaagacggttgtgctggatatcccgctgctgttcgaatccggattgcaatcgtggatggacaaagttctcgtggtgtacgtcgatgatgatgttcagttacgccgccttatggcacgtaacgggtttactgaagaagaagctctgaagcgcattcgttcacagtggcccagtgcggagaaagttattcgtgcagacgctgtcatcgacaataatggcaatattgaagaaacccgccgccagctgctggacattttacaccagtgggatctgctggacaaaggtggctccggccaccatcatcaccatcac

SEQ ID NO: 1752 - protein, 211 aa, synthetic construct
  REGION 1..211: note = Variant of 3'O-kinase
MAVTIGLTGGIAAGKSTVSAMMRELGLPVIDADEAARAVMKPGEEAYRDIVAEFGPGILRADGEIDRQKLGAIRFSDEQQRKVLNSIVGPAVLKKMLAEWEAHIGSGAKTVVLDIPLLFESGLQSWMDKVLVVYVDDDVQLRRLMARNGFTEEEALKRIRSQWPSAEKVIRADAVIDNNGNIEETRRQLLDILHQWDLLDKGGSGHHHHHH

SEQ ID NO: 1753 - DNA, 633 bp, synthetic construct
  misc_feature 1..633: note = Variant of 3'O-kinase
  source 1..633: mol_type = other DNA
atggcggttaccattggtttaacaggagggatcgcagcgggcaaatcgactgtgagtgccatgatgcgtgaactgggtctgccggtcatcgatgctgacgaggcagcacgcgccgttatgaagccaggcgaagaagcgtatcgctctattgtagctgaattcgggccgggcatccttcgtgcggatggcgagatcgatcgccagaaactgggtgctatccgcttttcggacgaacaacaacgtaaggtgctgaattcgattgtaggtcctgcagtcctgaagaagatgctcgcggagtgggaagctcatatcgggtcaggcgccaagacggttgtgctggatatcccgctgctgttcgaatccggattgcaatcgtggatggacaaagttctcgtggtgtacgtcgatgatgatgttcagttacgccgccttatggcacgtaacgggtttactgaagaagaagctctgaagcgcattcgttcacagtggcccagtgcggagaaagttaaacgtgcagacgctgtcatcgacaataatggcaatattgaagaaacccgccgccagctgctggacattttacaccagtgggatctgctggacaaaggtggctccggccaccatcatcaccatcac

SEQ ID NO: 1754 - protein, 211 aa, synthetic construct
  REGION 1..211: note = Variant of 3'O-kinase
MAVTIGLTGGIAAGKSTVSAMMRELGLPVIDADEAARAVMKPGEEAYRSIVAEFGPGILRADGEIDRQKLGAIRFSDEQQRKVLNSIVGPAVLKKMLAEWEAHIGSGAKTVVLDIPLLFESGLQSWMDKVLVVYVDDDVQLRRLMARNGFTEEEALKRIRSQWPSAEKVKRADAVIDNNGNIEETRRQLLDILHQWDLLDKGGSGHHHHHH

SEQ ID NO: 1755 - DNA, 633 bp, synthetic construct
  misc_feature 1..633: note = Variant of 3'O-kinase
  source 1..633: mol_type = other DNA
atggcggttaccattggtttaacaggagggatcgcagcgggcaaatcgactgtgagtgccatgatgcgtgaactgggtctgccggtcatcgatgctgacgaggcagcacgcgccgttatgaagccaggcgaagaagcgtatcgcgacattgtagctgaattcgggccgggcatccttcgtgcggatggcgagatcgatcgccagaaactgggtgctatccgcttttcggacgaacaacaacgtaaggtgctgaattcgattgtaggtcctgcagtcctgaagaagatgctcgcggagtgggaagctcatatcgggtcaggcgccaagacggttgtgctggatatcccgctgctgttcgaatccggattgcaatcgtggatggacaaagttctcgtggtgtacgtcgatgatgatgttcagttacgccgccttatggcacgtaacgggtttactgaagaagaagctctgaagcgcattcgttcacagtggcccagtgcggagaaagttactcgtgcagacgctgtcatcgacaataatggcaatattgaagaaacccgccgccagctgctggacattttacaccagtgggatctgctggacaaaggtggctccggccaccatcatcaccatcac

SEQ ID NO: 1756 - protein, 211 aa, synthetic construct
  REGION 1..211: note = Variant of 3'O-kinase
MAVTIGLTGGIAAGKSTVSAMMRELGLPVIDADEAARAVMKPGEEAYRDIVAEFGPGILRADGEIDRQKLGAIRFSDEQQRKVLNSIVGPAVLKKMLAEWEAHIGSGAKTVVLDIPLLFESGLQSWMDKVLVVYVDDDVQLRRLMARNGFTEEEALKRIRSQWPSAEKVTRADAVIDNNGNIEETRRQLLDILHQWDLLDKGGSGHHHHHH

SEQ ID NO: 1757 - DNA, 633 bp, synthetic construct
  misc_feature 1..633: note = Variant of 3'O-kinase
  source 1..633: mol_type = other DNA
atggcggttaccattggtttaacaggagggatcgcagcgggcaaatcgactgtgagtgccatgatgcgtgaactgggtctgccggtcatcgatgctgacgaggcagcacgcgccgttatgaagccaggcgaagaagcgtatcgcgacattgtagctgaattcgggccgggcatccttcgtgcggatggcgagatcgatcgccagaaactgggtgctatccgcttttcggacgaacaacaacgtaaggtgctgaattcgattgtaggtcctgcagtcctgaagaagatgctcgcggagtgggaagctcatatcgggcggggcgccaagacggttgtgctggatatcccgctgctgttcgaatccggattgcaatcgtggatggacaaagttctcgtggtgtacgtcgatgatgatgttcagttacgccgccttatggcacgtaacgggtttactgaagaagaagctctgaagcgcattcgttcacagtggcccagtgcggagaaagttaaacgtgcagacgctgtcatcgacaataatggcaatattgaagaaacccgccgccagctgctggacattttacaccagtgggatctgctggacaaaggtggctccggccaccatcatcaccatcac

SEQ ID NO: 1758 - protein, 211 aa, synthetic construct
  REGION 1..211: note = Variant of 3'O-kinase
MAVTIGLTGGIAAGKSTVSAMMRELGLPVIDADEAARAVMKPGEEAYRDIVAEFGPGILRADGEIDRQKLGAIRFSDEQQRKVLNSIVGPAVLKKMLAEWEAHIGRGAKTVVLDIPLLFESGLQSWMDKVLVVYVDDDVQLRRLMARNGFTEEEALKRIRSQWPSAEKVKRADAVIDNNGNIEETRRQLLDILHQWDLLDKGGSGHHHHHH

SEQ ID NO: 1759 - DNA, 633 bp, synthetic construct
  misc_feature 1..633: note = Variant of 3'O-kinase
  source 1..633: mol_type = other DNA
atggcggttaccattggtttaacaggagggatcgcagcgggcaaatcgactgtgagtgccatgatgcgtgaactgggtctgccggtcatcgatgctgacgaggcagcacgcgccgttatgaagccaggcgaagaagcgtatcgcgacattgtagctgaattcgggccgggcatccttcgtgcggatggcgagatcgatcgccagaaactgggtgctatccgcttttcggacgaacaacaacgtaaggtgctgtggtcgattgtaggtcctgcagtcctgaagaagatgctcgcggagtgggaagctcatatcgggtcaggcgccaagacggttgtgctggatatcccgctgctgttcgaatccggattgcaatcgtggatggacaaagttctcgtggtgtacgtcgatgatgatgttcagttacgccgccttatggcacgtaacgggtttactgaagaagaagctctgaagcgcattcgttcacagtggcccagtgcggagaaagttaaacgtgcagacgctgtcatcgacaataatggcaatattgaagaaacccgccgccagctgctggacattttacaccagtgggatctgctggacaaaggtggctccggccaccatcatcaccatcac

SEQ ID NO: 1760 - protein, 211 aa, synthetic construct
  REGION 1..211: note = Variant of 3'O-kinase
MAVTIGLTGGIAAGKSTVSAMMRELGLPVIDADEAARAVMKPGEEAYRDIVAEFGPGILRADGEIDRQKLGAIRFSDEQQRKVLWSIVGPAVLKKMLAEWEAHIGSGAKTVVLDIPLLFESGLQSWMDKVLVVYVDDDVQLRRLMARNGFTEEEALKRIRSQWPSAEKVKRADAVIDNNGNIEETRRQLLDILHQWDLLDKGGSGHHHHHH

SEQ ID NO: 1761 - DNA, 633 bp, synthetic construct
  misc_feature 1..633: note = Variant of 3'O-kinase
  source 1..633: mol_type = other DNA
atggcggttaccattggtttaacaggagggatcgcagcgggcaaatcgactgtgagtgccatgatgcgtgaactgggtctgccggtcatcgatgctgacgaggcagcacgcgccgttatgaagccaggcgaagaagcgtatcgcgacattgtaaaggaattcgggccgggcatccttcgtgcggatggcgagatcgatcgccagaaactgggtgctatccgcttttcggacgaacaacaacgtaaggtgctgaattcgattgtaggtcctgcagtcctgaagaagatgctcgcggagtgggaagctcatatcgggtcaggcgccaagacggttgtgctggatatcccgctgctgttcgaatccggattgcaatcgtggatggacaaagttctcgtggtgtacgtcgatgatgatgttcagttacgccgccttatggcacgtaacgggtttactgaagaagaagctctgaagcgcattcgttcacagtggcccagtgcggagaaagttaaacgtgcagacgctgtcatcgacaataatggcaatattgaagaaacccgccgccagctgctggacattttacaccagtgggatctgctggacaaaggtggctccggccaccatcatcaccatcac

SEQ ID NO: 1762 - protein, 211 aa, synthetic construct
  REGION 1..211: note = Variant of 3'O-kinase
MAVTIGLTGGIAAGKSTVSAMMRELGLPVIDADEAARAVMKPGEEAYRDIVKEFGPGILRADGEIDRQKLGAIRFSDEQQRKVLNSIVGPAVLKKMLAEWEAHIGSGAKTVVLDIPLLFESGLQSWMDKVLVVYVDDDVQLRRLMARNGFTEEEALKRIRSQWPSAEKVKRADAVIDNNGNIEETRRQLLDILHQWDLLDKGGSGHHHHHH

SEQ ID NO: 1763 - DNA, 633 bp, synthetic construct
  misc_feature 1..633: note = Variant of 3'O-kinase
  source 1..633: mol_type = other DNA
atggcggttaccattggtttaacaggagggatcgcagcgggcaaatcgactgtgagtgccatgatgcgtgaactgggtctgccggtcatcgatgctgacgaggcagcacgcgccgttatgaagccaggcgaagaagcgtatcgcgacattgtagctgaattcgggccgggcatccttcgtgcggatggcgagatcgatcgccagaaactgggtgctatccgcttttcggacgaacaacaacgtaaggtgctgaattcgattgtaggtcctgcagtcctgaagaagatgctcggtgagtgggaagctcatatcgggtcaggcgccaagacggttgtgctggatatcccgctgctgttcgaatccggattgcaatcgtggatggacaaagttctcgtggtgtacgtcgatgatgatgttcagttacgccgccttatggcacgtaacgggtttactgaagaagaagctctgaagcgcattcgttcacagtggcccagtgcggagaaagttaaacgtgcagacgctgtcatcgacaataatggcaatattgaagaaacccgccgccagctgctggacattttacaccagtgggatctgctggacaaaggtggctccggccaccatcatcaccatcac

SEQ ID NO: 1764 - protein, 211 aa, synthetic construct
  REGION 1..211: note = Variant of 3'O-kinase
MAVTIGLTGGIAAGKSTVSAMMRELGLPVIDADEAARAVMKPGEEAYRDIVAEFGPGILRADGEIDRQKLGAIRFSDEQQRKVLNSIVGPAVLKKMLGEWEAHIGSGAKTVVLDIPLLFESGLQSWMDKVLVVYVDDDVQLRRLMARNGFTEEEALKRIRSQWPSAEKVKRADAVIDNNGNIEETRRQLLDILHQWDLLDKGGSGHHHHHH

SEQ ID NO: 1765 - DNA, 633 bp, synthetic construct
  misc_feature 1..633: note = Variant of 3'O-kinase
  source 1..633: mol_type = other DNA
atggcggttaccattggtttaacaggagggatcgcagcgggcaaatcgactgtgagtgccatgatgcgtgaactgggtctgccggtcatcgatgctgacgaggcagcacgcgccgttatgaagccaggcgaagaagcgtatcgccgtattgtagctgaattcgggccgggcatccttcgtgcggatggcgagatcgatcgccagaaactgggtgctatccgcttttcggacgaacaacaacgtaaggtgctgaattcgattgtaggtcctgcagtcctgaagaagatgctcgcggagtgggaagctcatatcgggtcaggcgccaagacggttgtgctggatatcccgctgctgttcgaatccggattgcaatcgtggatggacaaagttctcgtggtgtacgtcgatgatgatgttcagttacgccgccttatggcacgtaacgggtttactgaagaagaagctctgaagcgcattcgttcacagtggcccagtgcggagaaagttaaacgtgcagacgctgtcatcgacaataatggcaatattgaagaaacccgccgccagctgctggacattttacaccagtgggatctgctggacaaaggtggctccggccaccatcatcaccatcac

SEQ ID NO: 1766 - protein, 211 aa, synthetic construct
  REGION 1..211: note = Variant of 3'O-kinase
MAVTIGLTGGIAAGKSTVSAMMRELGLPVIDADEAARAVMKPGEEAYRRIVAEFGPGILRADGEIDRQKLGAIRFSDEQQRKVLNSIVGPAVLKKMLAEWEAHIGSGAKTVVLDIPLLFESGLQSWMDKVLVVYVDDDVQLRRLMARNGFTEEEALKRIRSQWPSAEKVKRADAVIDNNGNIEETRRQLLDILHQWDLLDKGGSGHHHHHH

SEQ ID NO: 1767 - DNA, 633 bp, synthetic construct
  misc_feature 1..633: note = Variant of 3'O-kinase
  source 1..633: mol_type = other DNA
atggcggttaccattggtttaacaggagggatcgcagcgggcaaatcgactgtgagtgccatgatgcgtgaactgggtctgccggtcatcgatgctgacgaggcagcacgcgccgttatgaagccaggcgaagaagcgtatcgcgacattgtagctgaattcgggccgggcatccttcgtgcggatggcgagatcgatcgccagaaactgggtgctatccgcttttcggacgaacaacaacgtaaggtgctgaattcgattgtaggtcctgcagtcctgaagaagatgctcgcggagtgggaagctcatatcgggtcaggcgccgcgacggttgtgctggatatcccgctgctgttcgaatccggattgcaatcgtggatggacaaagttctcgtggtgtacgtcgatgatgatgttcagttacgccgccttatggcacgtaacgggtttactgaagaagaagctctgaagcgcattcgttcacagtggcccagtgcggagaaagttaaacgtgcagacgctgtcatcgacaataatggcaatattgaagaaacccgccgccagctgctggacattttacaccagtgggatctgctggacaaaggtggctccggccaccatcatcaccatcac

SEQ ID NO: 1768 - protein, 211 aa, synthetic construct
  REGION 1..211: note = Variant of 3'O-kinase
MAVTIGLTGGIAAGKSTVSAMMRELGLPVIDADEAARAVMKPGEEAYRDIVAEFGPGILRADGEIDRQKLGAIRFSDEQQRKVLNSIVGPAVLKKMLAEWEAHIGSGAATVVLDIPLLFESGLQSWMDKVLVVYVDDDVQLRRLMARNGFTEEEALKRIRSQWPSAEKVKRADAVIDNNGNIEETRRQLLDILHQWDLLDKGGSGHHHHHH

SEQ ID NO: 1769 - DNA, 633 bp, synthetic construct
  misc_feature 1..633: note = Variant of 3'O-kinase
  source 1..633: mol_type = other DNA
atggcggttaccattggtttaacaggagggatcgcagcgggcaaatcgactgtgagtgccatgatgcgtgaactgggtctgccggtcatcgatgctgacgaggcagcacgcgccgttatgaagccaggcgaagaagcgtatcgcgacattgtagctgaattcgggccgggcatccttcgtgcggatggcgagatcgatcgccagaaactgggtgctatccgcttttcggacgaacaacaacgtaaggtgctgaattcgattgtaggtcctgcagtcctgaagaagatgctcgcggagtgggaagctcatatcgggtcaggcgccaagacggttgtgctggatatcccgctgctgttcgaatccggattgcaatcgtggatggacaaagttctcgtggtgtacgtcgatgatgatgttcagttacgccgccttatggcacgtaacgggtttactgaagaagaagctctgaagcgcattcgttcacagtggcccagtgcggagaaagttaaacaggcagacgctgtcatcgacaataatggcaatattgaagaaacccgccgccagctgctggacattttacaccagtgggatctgctggacaaaggtggctccggccaccatcatcaccatcac

SEQ ID NO: 1770 - protein, 211 aa, synthetic construct
  REGION 1..211: note = Variant of 3'O-kinase
MAVTIGLTGGIAAGKSTVSAMMRELGLPVIDADEAARAVMKPGEEAYRDIVAEFGPGILRADGEIDRQKLGAIRFSDEQQRKVLNSIVGPAVLKKMLAEWEAHIGSGAKTVVLDIPLLFESGLQSWMDKVLVVYVDDDVQLRRLMARNGFTEEEALKRIRSQWPSAEKVKQADAVIDNNGNIEETRRQLLDILHQWDLLDKGGSGHHHHHH

SEQ ID NO: 1771 - DNA, 633 bp, synthetic construct
  misc_feature 1..633: note = Variant of 3'O-kinase
  source 1..633: mol_type = other DNA
atggcggttaccattggtttaacaggagggatcgcagcgggcaaatcgactgtgagtgccatgatgcgtgaactgggtctgccggtcatcgatgctgacgaggcagcacgcgccgttatgaagccaggcgaagaagcgtatcgcctgattgtagctgaattcgggccgggcatccttcgtgcggatggcgagatcgatcgccagaaactgggtgctatccgcttttcggacgaacaacaacgtaaggtgctgaattcgattgtaggtcctgcagtcctgaagaagatgctcgcggagtgggaagctcatatcgggtcaggcgccaagacggttgtgctggatatcccgctgctgttcgaatccggattgcaatcgtggatggacaaagttctcgtggtgtacgtcgatgatgatgttcagttacgccgccttatggcacgtaacgggtttactgaagaagaagctctgaagcgcattcgttcacagtggcccagtgcggagaaagttaaacgtgcagacgctgtcatcgacaataatggcaatattgaagaaacccgccgccagctgctggacattttacaccagtgggatctgctggacaaaggtggctccggccaccatcatcaccatcac

SEQ ID NO: 1772 - protein, 211 aa, synthetic construct
  REGION 1..211: note = Variant of 3'O-kinase
MAVTIGLTGGIAAGKSTVSAMMRELGLPVIDADEAARAVMKPGEEAYRLIVAEFGPGILRADGEIDRQKLGAIRFSDEQQRKVLNSIVGPAVLKKMLAEWEAHIGSGAKTVVLDIPLLFESGLQSWMDKVLVVYVDDDVQLRRLMARNGFTEEEALKRIRSQWPSAEKVKRADAVIDNNGNIEETRRQLLDILHQWDLLDKGGSGHHHHHH

SEQ ID NO: 1773 - DNA, 633 bp, synthetic construct
  misc_feature 1..633: note = Variant of 3'O-kinase
  source 1..633: mol_type = other DNA
atggcggttaccattggtttaacaggagggatcgcagcgggcaaatcgactgtgagtgccatgatgcgtgaactgggtctgccggtcatcgatgctgacgaggcagcacgcgccgttatgaagccaggcgaagaagcgtatcgcgacattgtagctgaattcgggccgggcatccttcgtgcggatggcgagatcgatcgccagaaactgggtgctatccgcttttcggacgaacaacaacgtaaggtgctgaattcgattgtaggtcctgcagtcctgaagaagatgctcgcggagtgggaagctcatatcgggtcaggcgccaagacggttgtgctggatatcccgctgctgttcgaatccggattgcaatcgtggacggacaaagttctcgtggtgtacgtcgatgatgatgttcagttacgccgccttatggcacgtaacgggtttactgaagaagaagctctgaagcgcattcgttcacagtggcccagtgcggagaaagttaaacgtgcagacgctgtcatcgacaataatggcaatattgaagaaacccgccgccagctgctggacattttacaccagtgggatctgctggacaaaggtggctccggccaccatcatcaccatcac

SEQ ID NO: 1774 - protein, 211 aa, synthetic construct
  REGION 1..211: note = Variant of 3'O-kinase
MAVTIGLTGGIAAGKSTVSAMMRELGLPVIDADEAARAVMKPGEEAYRDIVAEFGPGILRADGEIDRQKLGAIRFSDEQQRKVLNSIVGPAVLKKMLAEWEAHIGSGAKTVVLDIPLLFESGLQSWTDKVLVVYVDDDVQLRRLMARNGFTEEEALKRIRSQWPSAEKVKRADAVIDNNGNIEETRRQLLDILHQWDLLDKGGSGHHHHHH

SEQ ID NO: 1775 - DNA, 633 bp, synthetic construct
  misc_feature 1..633: note = Variant of 3'O-kinase
  source 1..633: mol_type = other DNA
atggcggttaccattggtttaacaggagggatcgcagcgggcaaatcgactgtgagtgccatgatgcgtgaactgggtctgccggtcatcgatgctgacgaggcagcacgcgccgttatgaagccaggcgaagaagcgtatcgcgacattgtagctgaattcgggccgggcatccttcgtgcggatggcgagatcgatcgccagaaactgggtgctatccgcttttcggacgaacaacaacgtaaggtgctgaattcgattgtaggtcctgcagtcctgaagaagatgctcgcggagtgggaagctcatatcgggtcaggcgccaagacggttgtgctggatatcccgctgctgttcgaatccggattgcaatcgtggatggacaaagttctcgtggtgtacgtcgatgatgatgttcagttacgccgccttatggcacgtaacgggtttactgaagaagaagctctgaagcgcattcgttcacagtggcccagtgcggagaaagttaaacgtgcagacgctgtcatcgacaataatggcaatattgaagaaacccgccgccagctgctggacattgttcaccagtgggatctgctggacaaaggtggctccggccaccatcatcaccatcac

SEQ ID NO: 1776 - protein, 211 aa, synthetic construct
  REGION 1..211: note = Variant of 3'O-kinase
MAVTIGLTGGIAAGKSTVSAMMRELGLPVIDADEAARAVMKPGEEAYRDIVAEFGPGILRADGEIDRQKLGAIRFSDEQQRKVLNSIVGPAVLKKMLAEWEAHIGSGAKTVVLDIPLLFESGLQSWMDKVLVVYVDDDVQLRRLMARNGFTEEEALKRIRSQWPSAEKVKRADAVIDNNGNIEETRRQLLDIVHQWDLLDKGGSGHHHHHH

SEQ ID NO: 1777 - DNA, 633 bp, synthetic construct
  misc_feature 1..633: note = Variant of 3'O-kinase
  source 1..633: mol_type = other DNA
atggcggttaccattggtttaacaggagggatcgcagcgggcaaatcgactgtgagtgccatgatgcgtgaactgggtctgccggtcatcgatgctgacgaggcagcacgcgccgttatgaagccaggcgaagaagcgtatgctgacattgtagctgaattcgggccgggcatccttcgtgcggatggcgagatcgatcgccagaaactgggtgctatccgcttttcggacgaacaacaacgtaaggtgctgaattcgattgtaggtcctgcagtcctgaagaagatgctcgcggagtgggaagctcatatcgggtcaggcgccaagacggttgtgctggatatcccgctgctgttcgaatccggattgcaatcgtggatggacaaagttctcgtggtgtacgtcgatgatgatgttcagttacgccgccttatggcacgtaacgggtttactgaagaagaagctctgaagcgcattcgttcacagtggcccagtgcggagaaagttaaacgtgcagacgctgtcatcgacaataatggcaatattgaagaaacccgccgccagctgctggacattttacaccagtgggatctgctggacaaaggtggctccggccaccatcatcaccatcac

SEQ ID NO: 1778 - protein, 211 aa, synthetic construct
  REGION 1..211: note = Variant of 3'O-kinase
MAVTIGLTGGIAAGKSTVSAMMRELGLPVIDADEAARAVMKPGEEAYADIVAEFGPGILRADGEIDRQKLGAIRFSDEQQRKVLNSIVGPAVLKKMLAEWEAHIGSGAKTVVLDIPLLFESGLQSWMDKVLVVYVDDDVQLRRLMARNGFTEEEALKRIRSQWPSAEKVKRADAVIDNNGNIEETRRQLLDILHQWDLLDKGGSGHHHHHH

SEQ ID NO: 1779 - DNA, 633 bp, synthetic construct
  misc_feature 1..633: note = Variant of 3'O-kinase
  source 1..633: mol_type = other DNA
atggcggttaccattggtttaacaggagggatcgcagcgggcaaatcgactgtgagtgccatgatgcgtgaactgggtctgccggtcatcgatgctgacgaggcagcacgcgccgttatgaagccaggcgaagaagcgtatcgcgacattgtagctgaattcgggccgggcatccttcgtgcggatggcgagatcgatcgccagaaactgggtgctatccgcttttcggacgaacaacaacgtaaggtgctgaattcgattgtaggtcctgcagtcctgcgtaagatgctcgcggagtgggaagctcatatcgggtcaggcgccaagacggttgtgctggatatcccgctgctgttcgaatccggattgcaatcgtggatggacaaagttctcgtggtgtacgtcgatgatgatgttcagttacgccgccttatggcacgtaacgggtttactgaagaagaagctctgaagcgcattcgttcacagtggcccagtgcggagaaagttaaacgtgcagacgctgtcatcgacaataatggcaatattgaagaaacccgccgccagctgctggacattttacaccagtgggatctgctggacaaaggtggctccggccaccatcatcaccatcac

SEQ ID NO: 1780 - protein, 211 aa, synthetic construct
  REGION 1..211: note = Variant of 3'O-kinase
MAVTIGLTGGIAAGKSTVSAMMRELGLPVIDADEAARAVMKPGEEAYRDIVAEFGPGILRADGEIDRQKLGAIRFSDEQQRKVLNSIVGPAVLRKMLAEWEAHIGSGAKTVVLDIPLLFESGLQSWMDKVLVVYVDDDVQLRRLMARNGFTEEEALKRIRSQWPSAEKVKRADAVIDNNGNIEETRRQLLDILHQWDLLDKGGSGHHHHHH

SEQ ID NO: 1781 - DNA, 633 bp, synthetic construct
  misc_feature 1..633: note = Variant of 3'O-kinase
  source 1..633: mol_type = other DNA
atggcggttaccattggtttaacaggagggatcgcagcgggcaaatcgactgtgagtgccatgatgcgtgaactgggtctgccggtcatcgatgctgacgaggcagcacgcgccgttatgaagccaggcgaagaagcgtatcgcgacattgtagctgaattcgggccggctatccttcgtgcggatggcgagatcgatcgccagaaactgggtgctatccgcttttcggacgaacaacaacgtaaggtgctgaattcgattgtaggtcctgcagtcctgaagaagatgctcgcggagtgggaagctcatatcgggtcaggcgccaagacggttgtgctggatatcccgctgctgttcgaatccggattgcaatcgtggatggacaaagttctcgtggtgtacgtcgatgatgatgttcagttacgccgccttatggcacgtaacgggtttactgaagaagaagctctgaagcgcattcgttcacagtggcccagtgcggagaaagttaaacgtgcagacgctgtcatcgacaataatggcaatattgaagaaacccgccgccagctgctggacattttacaccagtgggatctgctggacaaaggtggctccggccaccatcatcaccatcac

SEQ ID NO: 1782 - protein, 211 aa, synthetic construct
  REGION 1..211: note = Variant of 3'O-kinase
MAVTIGLTGGIAAGKSTVSAMMRELGLPVIDADEAARAVMKPGEEAYRDIVAEFGPAILRADGEIDRQKLGAIRFSDEQQRKVLNSIVGPAVLKKMLAEWEAHIGSGAKTVVLDIPLLFESGLQSWMDKVLVVYVDDDVQLRRLMARNGFTEEEALKRIRSQWPSAEKVKRADAVIDNNGNIEETRRQLLDILHQWDLLDKGGSGHHHHHH

SEQ ID NO: 1783 - DNA, 633 bp, synthetic construct
  misc_feature 1..633: note = Variant of 3'O-kinase
  source 1..633: mol_type = other DNA
atggcggttaccattggtttaacaggagggatcgcagcgggcaaatcgactgtgagtgccatgatgcgtgaactgggtctgccggtcatcgatgctgacgaggcagcacgcgccgttatgaagccaggcgaagaagcgtatcgcgacattgtagctgaattcgggccgggcatccttcgtgcggatggcgagatcgatcgccagaaactgggtgctatccgcttttcggacgaacaacaacgtaaggtgctgaattcgattgtaggtcctgcagtcctgaagaagatgctcgcggagtgggaagctcatatcgggtcaggcgccaagacggttgtgctggatatcccgctgctgttcgaatccggattgcaatcgtggatggacaaagttctcgtggtgtacgtcgatgatgatgttcagttacgccgccttatggcacgtaacgggtttactgaagaagaagctctgaagcgcattcgttcacagtggcccagtgcggagaaagttaaacgtgcagacgctgtcatcgacaataatggcaatattgaagaaacccgccgccagctgctggacattttacaccagtgggatagtctggacaaaggtggctccggccaccatcatcaccatcac

SEQ ID NO: 1784 - protein, 211 aa, synthetic construct
  REGION 1..211: note = Variant of 3'O-kinase
MAVTIGLTGGIAAGKSTVSAMMRELGLPVIDADEAARAVMKPGEEAYRDIVAEFGPGILRADGEIDRQKLGAIRFSDEQQRKVLNSIVGPAVLKKMLAEWEAHIGSGAKTVVLDIPLLFESGLQSWMDKVLVVYVDDDVQLRRLMARNGFTEEEALKRIRSQWPSAEKVKRADAVIDNNGNIEETRRQLLDILHQWDSLDKGGSGHHHHHH

SEQ ID NO: 1785 - DNA, 633 bp, synthetic construct
  misc_feature 1..633: note = Variant of 3'O-kinase
  source 1..633: mol_type = other DNA
atggcggttaccattggtttaacaggagggatcgcagcgggcaaatcgactgtgagtgccatgatgcgtgaactgggtctgccggtcatcgatgctgacgaggcagcacgcgccgttatgaagccaggcgaagaagcgtatcgcgacattgtagctgaattcgggccgggcatccttcgtgcggatggcgagatcgatcgccagaaactgggtgctatccgcttttcggacgaacaacaacgtaaggtgctgaattcgattgtaggtcctgcagtcctgaagaagatgctcgcggagtgggaagctcatatcgggtcaggcgccaagacggttgtgctggatatcccgctgctgttcgaatccggattgcaatcgtggatggacaaagttctcgtggtgtacgtcgatgatgatgttcagttacgccgccttatggcacgtaacgggtttactgaagaagaagctctgaagcgcattcgttcacagtggcccagtgcggagaaagttaaactggcagacgctgtcatcgacaataatggcaatattgaagaaacccgccgccagctgctggacattttacaccagtgggatctgctggacaaaggtggctccggccaccatcatcaccatcac

SEQ ID NO: 1786 - protein, 211 aa, synthetic construct
  REGION 1..211: note = Variant of 3'O-kinase
MAVTIGLTGGIAAGKSTVSAMMRELGLPVIDADEAARAVMKPGEEAYRDIVAEFGPGILRADGEIDRQKLGAIRFSDEQQRKVLNSIVGPAVLKKMLAEWEAHIGSGAKTVVLDIPLLFESGLQSWMDKVLVVYVDDDVQLRRLMARNGFTEEEALKRIRSQWPSAEKVKLADAVIDNNGNIEETRRQLLDILHQWDLLDKGGSGHHHHHH

SEQ ID NO: 1787 - DNA, 633 bp, synthetic construct
  misc_feature 1..633: note = Variant of 3'O-kinase
  source 1..633: mol_type = other DNA
atggcggttaccattggtttaacaggagggatcgcagcgggcaaatcgactgtgagtgccatgatgcgtgaactgggtctgccggtcatcgatgctgacgaggcagcacgcgccgttatgaagccaggcgaagaagcgtattgtgacattgtagctgaattcgggccgggcatccttcgtgcggatggcgagatcgatcgccagaaactgggtgctatccgcttttcggacgaacaacaacgtaaggtgctgaattcgattgtaggtcctgcagtcctgaagaagatgctcgcggagtgggaagctcatatcgggtcaggcgccaagacggttgtgctggatatcccgctgctgttcgaatccggattgcaatcgtggatggacaaagttctcgtggtgtacgtcgatgatgatgttcagttacgccgccttatggcacgtaacgggtttactgaagaagaagctctgaagcgcattcgttcacagtggcccagtgcggagaaagttaaacgtgcagacgctgtcatcgacaataatggcaatattgaagaaacccgccgccagctgctggacattttacaccagtgggatctgctggacaaaggtggctccggccaccatcatcaccatcac

SEQ ID NO: 1788 - protein, 211 aa, synthetic construct
  REGION 1..211: note = Variant of 3'O-kinase
MAVTIGLTGGIAAGKSTVSAMMRELGLPVIDADEAARAVMKPGEEAYCDIVAEFGPGILRADGEIDRQKLGAIRFSDEQQRKVLNSIVGPAVLKKMLAEWEAHIGSGAKTVVLDIPLLFESGLQSWMDKVLVVYVDDDVQLRRLMARNGFTEEEALKRIRSQWPSAEKVKRADAVIDNNGNIEETRRQLLDILHQWDLLDKGGSGHHHHHH

SEQ ID NO: 1789 - DNA, 633 bp, synthetic construct
  misc_feature 1..633: note = Variant of 3'O-kinase
  source 1..633: mol_type = other DNA
atggcggttaccattggtttaacaggagggatcgcagcgggcaaatcgactgtgagtgccatgatgcgtgaactgggtctgccggtcatcgatgctgacgaggcagcacgcgccgttatgaagccaggcgaagaagcgtatacggacattgtagctgaattcgggccgggcatccttcgtgcggatggcgagatcgatcgccagaaactgggtgctatccgcttttcggacgaacaacaacgtaaggtgctgaattcgattgtaggtcctgcagtcctgaagaagatgctcgcggagtgggaagctcatatcgggtcaggcgccaagacggttgtgctggatatcccgctgctgttcgaatccggattgcaatcgtggatggacaaagttctcgtggtgtacgtcgatgatgatgttcagttacgccgccttatggcacgtaacgggtttactgaagaagaagctctgaagcgcattcgttcacagtggcccagtgcggagaaagttaaacgtgcagacgctgtcatcgacaataatggcaatattgaagaaacccgccgccagctgctggacattttacaccagtgggatctgctggacaaaggtggctccggccaccatcatcaccatcac

SEQ ID NO: 1790 - protein, 211 aa, synthetic construct
  REGION 1..211: note = Variant of 3'O-kinase
MAVTIGLTGGIAAGKSTVSAMMRELGLPVIDADEAARAVMKPGEEAYTDIVAEFGPGILRADGEIDRQKLGAIRFSDEQQRKVLNSIVGPAVLKKMLAEWEAHIGSGAKTVVLDIPLLFESGLQSWMDKVLVVYVDDDVQLRRLMARNGFTEEEALKRIRSQWPSAEKVKRADAVIDNNGNIEETRRQLLDILHQWDLLDKGGSGHHHHHH

SEQ ID NO: 1791 - DNA, 633 bp, synthetic construct
  misc_feature 1..633: note = Variant of 3'O-kinase
  source 1..633: mol_type = other DNA
atggcggttaccattggtttaacaggagggatcgcagcgggcaaatcgactgtgagtgccatgatgcgtgaactgggtctgccggtcatcgatgctgacgaggcagcacgcgccgttatgaagccaggcgaagaagcgtatcgcgacattgtagctgaattcgggccgggcatccttcgtgcggatggcgagatcgatcgccagaaactgggtgctatccgcttttcggacgaacaacaacgtaaggtgctgaattcgattgtaggtcctgcagtcctgaagaagatgctcgcggagtgggaagctcatgttgggtcaggcgccaagacggttgtgctggatatcccgctgctgttcgaatccggattgcaatcgtggatggacaaagttctcgtggtgtacgtcgatgatgatgttcagttacgccgccttatggcacgtaacgggtttactgaagaagaagctctgaagcgcattcgttcacagtggcccagtgcggagaaagttaaacgtgcagacgctgtcatcgacaataatggcaatattgaagaaacccgccgccagctgctggacattttacaccagtgggatctgctggacaaaggtggctccggccaccatcatcaccatcac

SEQ ID NO: 1792 - protein, 211 aa, synthetic construct
  REGION 1..211: note = Variant of 3'O-kinase
MAVTIGLTGGIAAGKSTVSAMMRELGLPVIDADEAARAVMKPGEEAYRDIVAEFGPGILRADGEIDRQKLGAIRFSDEQQRKVLNSIVGPAVLKKMLAEWEAHVGSGAKTVVLDIPLLFESGLQSWMDKVLVVYVDDDVQLRRLMARNGFTEEEALKRIRSQWPSAEKVKRADAVIDNNGNIEETRRQLLDILHQWDLLDKGGSGHHHHHH

SEQ ID NO: 1793 - DNA, 633 bp, synthetic construct
  misc_feature 1..633: note = Variant of 3'O-kinase
  source 1..633: mol_type = other DNA
atggcggttaccattggtttaacaggagggatcgcagcgggcaaatcgactgtgagtgccatgatgcgtgaactgggtctgccggtcatcgatgctgacgaggcagcacgcgccgttatgaagccaggcgaagaagcgtatcgcgacattgtagctgaattcgggccgggcatccttcgtgcggatggcgagatcgatcgccagaaactgggtgctatccgcttttcggacgaacaacaacgtaaggtgctgaattcgattgtaggtcctgcagtcctgaagaagatgctcgcggagtgggaagctcatatcgggtcaggcgccatgacggttgtgctggatatcccgctgctgttcgaatccggattgcaatcgtggatggacaaagttctcgtggtgtacgtcgatgatgatgttcagttacgccgccttatggcacgtaacgggtttactgaagaagaagctctgaagcgcattcgttcacagtggcccagtgcggagaaagttaaacgtgcagacgctgtcatcgacaataatggcaatattgaagaaacccgccgccagctgctggacattttacaccagtgggatctgctggacaaaggtggctccggccaccatcatcaccatcac

SEQ ID NO: 1794 - protein, 211 aa, synthetic construct
  REGION 1..211: note = Variant of 3'O-kinase
MAVTIGLTGGIAAGKSTVSAMMRELGLPVIDADEAARAVMKPGEEAYRDIVAEFGPGILRADGEIDRQKLGAIRFSDEQQRKVLNSIVGPAVLKKMLAEWEAHIGSGAMTVVLDIPLLFESGLQSWMDKVLVVYVDDDVQLRRLMARNGFTEEEALKRIRSQWPSAEKVKRADAVIDNNGNIEETRRQLLDILHQWDLLDKGGSGHHHHHH

SEQ ID NO: 1795 - DNA, 633 bp, synthetic construct
  misc_feature 1..633: note = Variant of 3'O-kinase
  source 1..633: mol_type = other DNA
atggcggttaccattggtttaacaggagggatcgcagcgggcaaatcgactgtgagtgccatgatgcgtgaactgggtctgccggtcatcgatgctgacgaggcagcacgcgccgttatgaagccaggcgaagaagcgtatcgcgacattgtagctgaattcgggccgggcatccttcgtgcggatggcgagatcgatcgccagaaactgggtgctatccgcttttcggacgaacaacaacgtaaggtgctgaattcgattgtaggtcctgcagtcctgaagaagatgctcgcggagtgggaagctcatatcgggtcaggcgccaagacggttgtgctggatatcccgctgctgttcgaatccggattgcaatcgtggatggacaaagttctcgtggtgtacgtcgatgatgatgttcagttacgccgccttatggcacgtaacgggtttactgaagaagaagctctgaagcgcattcgttcacagtggcccagtgcggagaaagttaaacgtgcagacgctgtcatcgacaataatggcaatattgaagaaaccagtcgccagctgctggacattttacaccagtgggatctgctggacaaaggtggctccggccaccatcatcaccatcac

SEQ ID NO: 1796 - protein, 211 aa, synthetic construct
  REGION 1..211: note = Variant of 3'O-kinase
MAVTIGLTGGIAAGKSTVSAMMRELGLPVIDADEAARAVMKPGEEAYRDIVAEFGPGILRADGEIDRQKLGAIRFSDEQQRKVLNSIVGPAVLKKMLAEWEAHIGSGAKTVVLDIPLLFESGLQSWMDKVLVVYVDDDVQLRRLMARNGFTEEEALKRIRSQWPSAEKVKRADAVIDNNGNIEETSRQLLDILHQWDLLDKGGSGHHHHHH

SEQ ID NO: 1797 - DNA, 633 bp, synthetic construct
  misc_feature 1..633: note = Variant of 3'O-kinase
  source 1..633: mol_type = other DNA
atggcggttaccattggtttaacaggagggatcgcagcgggcaaatcgactgtgagtgccatgatgcgtgaactgggtctgccggtcatcgatgctgacgaggcagcacgcgccgttatgaagccaggcgaagaagcgtatcgcgacattattgctgaattcgggccgggcatccttcgtgcggatggcgagatcgatcgccagaaactgggtgctatccgcttttcggacgaacaacaacgtaaggtgctgaattcgattgtaggtcctgcagtcctgaagaagatgctcgcggagtgggaagctcatatcgggtcaggcgccaagacggttgtgctggatatcccgctgctgttcgaatccggattgcaatcgtggatggacaaagttctcgtggtgtacgtcgatgatgatgttcagttacgccgccttatggcacgtaacgggtttactgaagaagaagctctgaagcgcattcgttcacagtggcccagtgcggagaaagttaaacgtgcagacgctgtcatcgacaataatggcaatattgaagaaacccgccgccagctgctggacattttacaccagtgggatctgctggacaaaggtggctccggccaccatcatcaccatcac

SEQ ID NO: 1798 - protein, 211 aa, synthetic construct
  REGION 1..211: note = Variant of 3'O-kinase
MAVTIGLTGGIAAGKSTVSAMMRELGLPVIDADEAARAVMKPGEEAYRDIIAEFGPGILRADGEIDRQKLGAIRFSDEQQRKVLNSIVGPAVLKKMLAEWEAHIGSGAKTVVLDIPLLFESGLQSWMDKVLVVYVDDDVQLRRLMARNGFTEEEALKRIRSQWPSAEKVKRADAVIDNNGNIEETRRQLLDILHQWDLLDKGGSGHHHHHH

SEQ ID NO: 1799 - DNA, 633 bp, synthetic construct
  misc_feature 1..633: note = Variant of 3'O-kinase
  source 1..633: mol_type = other DNA
atggcggttaccattggtttaacaggagggatcgcagcgggcaaatcgactgtgagtgccatgatgcgtgaactgggtctgccggtcatcgatgctgacgaggcagcacgcgccgttatgaaaccaggcgaagaagcgtatcgcgacattgtagctgaattcgggccgggcatccttcgtgcggatggccgtatcgatcgcgggaaactgcgtgccatccgcttttcggacgaacaacaacgtaaggtgctgaattcgattgtaggtcctgcagtcctgaagaagatgctcgcggagtgggaagctcatatcgggtcaggcgccaagacggttgtgctggatatcccgctgctgttcgaatccggattgcaatcgtggatggacaaagttctcgtggtgtacgttgatgatgatgttcagttacgccgccttatggcacgtaacgggctgactgaagaagaagctctgatgcgcattcgctcgcagtggcccagtgcggagaaagttaaacgtgcagacgctgtcatcgacaataatggcaccattgaagatacccgccgccagctgctggacattttacaccagtgggatctgctggacaaaggtggctccggccaccatcatcaccatcac

SEQ ID NO: 1800 - protein, 211 aa, synthetic construct
  REGION 1..211: note = Variant of 3'O-kinase
MAVTIGLTGGIAAGKSTVSAMMRELGLPVIDADEAARAVMKPGEEAYRDIVAEFGPGILRADGRIDRGKLRAIRFSDEQQRKVLNSIVGPAVLKKMLAEWEAHIGSGAKTVVLDIPLLFESGLQSWMDKVLVVYVDDDVQLRRLMARNGLTEEEALMRIRSQWPSAEKVKRADAVIDNNGTIEDTRRQLLDILHQWDLLDKGGSGHHHHHH

SEQ ID NO: 1801 - DNA, 633 bp, synthetic construct
  misc_feature 1..633: note = Variant of 3'O-kinase
  source 1..633: mol_type = other DNA
atggcggttaccattggtttaacaggagggatcgcagcgggcaaatcgactgtgagtgccatgatgcgtgaactgggtctgccggtcatcgatgctgacgaggcagcacgcgccgttatgaaaccaggcgaagaagcgtatcgcgacattgtagctgaattcgggccgggcatccttcgtgcggatggccgtatcgatcgcgggaaactgcgtgacatccgcttttcggacgaacaacaacgtaaggtgctgaattcgattgtaggtcctgcagtcctgaagaagatgctcgcggagtgggaagctcatatcgggtcaggcgccaagacggttgtgctggatgttccgctgctgttcgaatccggattgcaatcgtggatggacaaagttctcgtggtgtacgttgatgatgatgttcagttacgccgccttatggcacgtaacgggctgactgaagaagaagctctgatgcgcattcgttcacagtggcccagtgcggagaaagttaaacgtgcagacgctgtcatcgacaataatggcaatattgaagatacccgccgccagctgctggacattttacaccagtgggatctgctggacaaaggtggctccggccaccatcatcaccatcac

SEQ ID NO: 1802 - protein, 211 aa, synthetic construct
  REGION 1..211: note = Variant of 3'O-kinase
MAVTIGLTGGIAAGKSTVSAMMRELGLPVIDADEAARAVMKPGEEAYRDIVAEFGPGILRADGRIDRGKLRDIRFSDEQQRKVLNSIVGPAVLKKMLAEWEAHIGSGAKTVVLDVPLLFESGLQSWMDKVLVVYVDDDVQLRRLMARNGLTEEEALMRIRSQWPSAEKVKRADAVIDNNGNIEDTRRQLLDILHQWDLLDKGGSGHHHHHH

SEQ ID NO: 1803 - DNA, 633 bp, synthetic construct
  misc_feature 1..633: note = Variant of 3'O-kinase
  source 1..633: mol_type = other DNA
atggcggttaccattggtttaacaggaagtatcgcagcgggcaaatcgactgtgagtgccatgatgcgtgaactgggttttccggtcatcgatgctgacgaggcagcacgctcggttatgaagccaggcgaagaagcgtatcgcatgattgtagctgaattcgggccgggcatccttcgtgcggatggcgagatcgatcgcgggaaactgcgtgctatccgcttttcggacgaacaacaacgtaaggtgctgaattcgattgtaggtcctgcagtcctgaagaagatgctcgcggagtgggaagctcatatcgggtcaggcgccaagacggttgtgctggatatcccgctgctgttcgaatccggattgcaaagttggatggacaaagttctcgtggtgtacgttgatgatgatgttcagttacgccgccttatggcacgtaacgggtttactgaagaagaagctctgatgcgcattcgttcacagtggcccagtgcggagaaagttaaacgtgcagacgctgtcatcgacaataatggcaatattgaagatacccgccgccagctgctggacattttacaccagtgggatctgctggacaaaggtggctccggccaccatcatcaccatcac

SEQ ID NO: 1804 - protein, 211 aa, synthetic construct
  REGION 1..211: note = Variant of 3'O-kinase
MAVTIGLTGSIAAGKSTVSAMMRELGFPVIDADEAARSVMKPGEEAYRMIVAEFGPGILRADGEIDRGKLRAIRFSDEQQRKVLNSIVGPAVLKKMLAEWEAHIGSGAKTVVLDIPLLFESGLQSWMDKVLVVYVDDDVQLRRLMARNGFTEEEALMRIRSQWPSAEKVKRADAVIDNNGNIEDTRRQLLDILHQWDLLDKGGSGHHHHHH

SEQ ID NO: 1805 - DNA, 633 bp, synthetic construct
  misc_feature 1..633: note = Variant of 3'O-kinase
  source 1..633: mol_type = other DNA
atggcggttaccattggtttaacaggagggatcgcagcgggcaaatcgactgtgagtgccatgatgcgtgaactgggtctgccggtcatcgatgctgacgaggcagcacgcgccgttatgaaaccaggcgaagaagcgtatcgcgacattgtagctgaattcgggccgggcatccttcgtgcggatggcgagatcgatcgcgggaaactgcgtgctatccgcttttcggacgaacaacaacgtaaggtgctgaattcgattgtaggtcctgcagtcctgaagaagatgctcgcggagtgggaagctcatatcgggtcaggcgccaagacggttgtgctggatattccgggcctgttcgaatccggattgcagtcgtggatggacaaagttctcgtggtgtacgttgatgatgatgttcagttacgccgccttatggcacgtaacgggctgactgaagaagaagctctgatgcgcattcgttcacagtggcccagtgcggagaaagttaaacgtgcagacgctgtcatcgacaataatggcaatattgaagatacccgccgccagctgctggacattttacaccagtgggatctgctggacaaaggtggctccggccaccatcatcaccatcac

SEQ ID NO: 1806 - protein, 211 aa, synthetic construct
  REGION 1..211: note = Variant of 3'O-kinase
MAVTIGLTGGIAAGKSTVSAMMRELGLPVIDADEAARAVMKPGEEAYRDIVAEFGPGILRADGEIDRGKLRAIRFSDEQQRKVLNSIVGPAVLKKMLAEWEAHIGSGAKTVVLDIPGLFESGLQSWMDKVLVVYVDDDVQLRRLMARNGLTEEEALMRIRSQWPSAEKVKRADAVIDNNGNIEDTRRQLLDILHQWDLLDKGGSGHHHHHH

SEQ ID NO: 1807 - DNA, 633 bp, synthetic construct
  misc_feature 1..633: note = Variant of 3'O-kinase
  source 1..633: mol_type = other DNA
atggcggttaccattggtttaacaggaggtatcgcagcgggcaaatcgactgtgagtgccatgatgcgtgaactgggttttccggtcatcgatgctgacgaggcagcacgcgccgttatgaagccaggcgaagaagcgtatcgcgacattgtagctgaattcgggccgggcatccttgctgcggatggcgagatcgatcgcgggaaactgcgtgctatccgcttttcggacgaacaacaacgtaagcgcctgaattcgattgtaggtcctgcagtcctgaagaagatgctcgcggagtgggaagctcatatcgggtcaggcgccaagacggttgtgctggatatcccgctgctgttcgaatccggattgcaagagtggatggacaaagttctcgtggtgtacgttgatgatgatgttcagttacgccgccttatggcacgtaacgggtttactgaagaagaagctctgatgcgcattcgttcacagtggcccagtgcggagaaagttaaacgtgcagacgctgtcatcgacaataatggcaatattgaagatacccgccgccagctgctggacattttacaccagtgggatctgctggacaaaggtggctccggccaccatcatcaccatcac

SEQ ID NO: 1808 - protein, 211 aa, synthetic construct
  REGION 1..211: note = Variant of 3'O-kinase
MAVTIGLTGGIAAGKSTVSAMMRELGFPVIDADEAARAVMKPGEEAYRDIVAEFGPGILAADGEIDRGKLRAIRFSDEQQRKRLNSIVGPAVLKKMLAEWEAHIGSGAKTVVLDIPLLFESGLQEWMDKVLVVYVDDDVQLRRLMARNGFTEEEALMRIRSQWPSAEKVKRADAVIDNNGNIEDTRRQLLDILHQWDLLDKGGSGHHHHHH

SEQ ID NO: 1809 - DNA, 633 bp, synthetic construct
  misc_feature 1..633: note = Variant of 3'O-kinase
  source 1..633: mol_type = other DNA
atggcggttaccattggtttaacaggagggatcgcagcgggcaaatcgactgtgagtgccatgatgcgtgaactgggtctgccggtcatcgatgctgacgaggcagcacgcgccgttatgaaaccaggcgaagaagcgtatcgcgacattgtagctgaattcgggccgggcatccttcgtgcggatggccgtatcgatcgcgggaaactgcgtgccatccgcttttcggacgaacaacaacgtaaggtgctgaattcgattgtaggtcctgcagtcctgaagaagatgctcgcggagtgggaagctatgatcgggtcaggcgccaagacggttgtgctggatatcccgctgctgttcgaatccggattgcaatcgtggatggacaaagttctcgtggtgtacgttgatgatgatgttcagttacgccgccttatggcacgtaacgggctgactgaagaagaagctctgatgcgcattcgttcacagtggcccagtgcggagaaagttaaacgtgcagacgctgtcatcgacaataatggcaccattgaagatacccgccgccagctgctggacattttacaccagtgggatctgctggacaaaggtggctccggccaccatcatcaccatcac

SEQ ID NO: 1810 - protein, 211 aa, synthetic construct
  REGION 1..211: note = Variant of 3'O-kinase
MAVTIGLTGGIAAGKSTVSAMMRELGLPVIDADEAARAVMKPGEEAYRDIVAEFGPGILRADGRIDRGKLRAIRFSDEQQRKVLNSIVGPAVLKKMLAEWEAMIGSGAKTVVLDIPLLFESGLQSWMDKVLVVYVDDDVQLRRLMARNGLTEEEALMRIRSQWPSAEKVKRADAVIDNNGTIEDTRRQLLDILHQWDLLDKGGSGHHHHHH

SEQ ID NO: 1811 - DNA, 633 bp, synthetic construct
  misc_feature 1..633: note = Variant of 3'O-kinase
  source 1..633: mol_type = other DNA
atggcggttaccattggtttaacaggagggatcgcagcgggcaaatcgactgtgagtgccatgatgcgtgaactgggtctgccggtcatcgatgctgacgaggcagcacgcgccgttatgaagccaggcgaagaagcgtatcgcgacattgtagctgaattcgggccgggcatccttcgtgcggatggcgagatcgatcgcgggaaactgcgtgctatccgcttttcggacgaacaacaacgtaaggtgctgaattcgattgtaggtcctgcagtcctgaagaagatgctcgcggagtgggaagcttttatcgggtcaggcgccaagacggttgtgctggatatcccgctgctgttcgaatccggattgcaatcgtggatggacaaagttctcgtggtgtacgttgatgatgatgttcagttacgccgccttatggcacgtaacgggtttactgaagaagaagctctgatgcgcattcgttcacagtggcccagtgcggagaaagttaaacgtgcagacgctgtcatcgacaataatggcaatgaggaagatacccgccgccagctgctggacattttacaccagtgggatctgctggacaaaggtggctccggccaccatcatcaccatcac

SEQ ID NO: 1812 - protein, 211 aa, synthetic construct
  REGION 1..211: note = Variant of 3'O-kinase
MAVTIGLTGGIAAGKSTVSAMMRELGLPVIDADEAARAVMKPGEEAYRDIVAEFGPGILRADGEIDRGKLRAIRFSDEQQRKVLNSIVGPAVLKKMLAEWEAFIGSGAKTVVLDIPLLFESGLQSWMDKVLVVYVDDDVQLRRLMARNGFTEEEALMRIRSQWPSAEKVKRADAVIDNNGNEEDTRRQLLDILHQWDLLDKGGSGHHHHHH

SEQ ID NO: 1813 - DNA, 633 bp, synthetic construct
  misc_feature 1..633: note = Variant of 3'O-kinase
  source 1..633: mol_type = other DNA
atggcggttaccattggtttaacaggagggatcgcagcgggcaaatcgactgtgagtgccatgatgcgtgaactgggtctgccggtcatcgatgctgacgaggcagcacgcgccgttatgaaaccaggcgaagaagcgtatcgcgacattgtagctgaattcgggccgggcatccttcgtgcggatggcgaaatcgatcgcgggaaactgcgtgacatccgcttttcggacgaacaacaacgtaaggtgctgaattcgattgtaggtcctgcagtcctgaagaagatgctcgcggagtgggaagctatgatcgggtcaggcgccaagacggttgtgctggatattccgctgctgttcgaatccggattgcaggcgtggatggacaaagttctcgtggtgtacgttgatgatgatgttcagttacgccgccttatggcacgtaacgggctgactgaagaagaagctctgatgcgcattgaatcgcagtggcccagtgcggagaaagttaaacgtgcagacgctgtcatcgacaataatggcagcattgaagatacccgccgccagctgctggacattttacaccagtgggatctgctggacaaaggtggctccggccaccatcatcaccatcac

SEQ ID NO: 1814 - protein, 211 aa, synthetic construct
  REGION 1..211: note = Variant of 3'O-kinase
MAVTIGLTGGIAAGKSTVSAMMRELGLPVIDADEAARAVMKPGEEAYRDIVAEFGPGILRADGEIDRGKLRDIRFSDEQQRKVLNSIVGPAVLKKMLAEWEAMIGSGAKTVVLDIPLLFESGLQAWMDKVLVVYVDDDVQLRRLMARNGLTEEEALMRIESQWPSAEKVKRADAVIDNNGSIEDTRRQLLDILHQWDLLDKGGSGHHHHHH

SEQ ID NO: 1815 - DNA, 633 bp, synthetic construct
  misc_feature 1..633: note = Variant of 3'O-kinase
  source 1..633: mol_type = other DNA
atggcggttaccattggtttaacaggagggatcgcagcgggcaaatcgactgtgagtgccatgatgcgtgaactgggtctgccggtcatcgatgctgacgaggcagcacgcgccgttatgaagccaggcgaagaagcgtatcgcgacattgtagctgaattcgggccgggcatccttcgcgcggatggcgagatcgatcgcagcaaactgcgtctgatccgcttttcggacgaacaacaacgtaagcgcctgaattcgattgtaggtcctgcagtcctgaagaagatgctcgcggagtgggaagctcatatcgggtcaggcgccaagacggttgtgctggatatcccgctgctgttcgaatccggattgcaatcgtggatggacaaagttctcgtggtgtacgttgatgatgatgttcagttacgccgccttatggcacgtaacgggtttactgaagaagaagctctgatgcgcattcgttcacagtggcccagtgcggagaaagttaaacgtgcagacgctgaaatcgacaataatggcaatattgaagatacccgccgccagctgctggacattttacaccagtgggatctgctggacaaaggtggctccggccaccatcatcaccatcac

SEQ ID NO: 1816 - protein, 211 aa, synthetic construct
  REGION 1..211: note = Variant of 3'O-kinase
MAVTIGLTGGIAAGKSTVSAMMRELGLPVIDADEAARAVMKPGEEAYRDIVAEFGPGILRADGEIDRSKLRLIRFSDEQQRKRLNSIVGPAVLKKMLAEWEAHIGSGAKTVVLDIPLLFESGLQSWMDKVLVVYVDDDVQLRRLMARNGFTEEEALMRIRSQWPSAEKVKRADAEIDNNGNIEDTRRQLLDILHQWDLLDKGGSGHHHHHH

SEQ ID NO: 1817 - DNA, 633 bp, synthetic construct
  misc_feature 1..633: note = Variant of 3'O-kinase
  source 1..633: mol_type = other DNA
atggcggttaccattggtttaacaggagggatcgcagcgggcaaatcgactgtgagtgccatgatgcgtgaactgggtctgccggtcatcgatgctgacgaggcagcacgcgccgttatggcgccaggcgaagaagcgtatcgcgacattgtagctgaattcgggccgggcatccttcgtgcggatggccgtatcgatcgcgggaaactgcgtgacatccgcttttcggacgaacaacaacgtaaggtgctgaattcgattgtaggtcctgcagtcctgaagaagatgctcgcggagtgggaagctatgatcgggtcaggcgccaagacggttgtgctggatatcccgctgctgttcgaatccggattgcaatcgtggatggacaaagttctcgtggtgtacgttgatgatgatgttcagttacgccgccttatggcacgtaacgggtttactgaagaagaagctctgatgcgcattaaatcgcagtggcccagtgcggagaaagttaaacgtgcagacgctgtcatcgacaataatggcaacattgaagatacccgccgccagctgctggacattttacaccagtgggatctgctggacaaaggtggctccggccaccatcatcaccatcac

SEQ ID NO: 1818 - protein, 211 aa, synthetic construct
  REGION 1..211: note = Variant of 3'O-kinase
MAVTIGLTGGIAAGKSTVSAMMRELGLPVIDADEAARAVMAPGEEAYRDIVAEFGPGILRADGRIDRGKLRDIRFSDEQQRKVLNSIVGPAVLKKMLAEWEAMIGSGAKTVVLDIPLLFESGLQSWMDKVLVVYVDDDVQLRRLMARNGFTEEEALMRIKSQWPSAEKVKRADAVIDNNGNIEDTRRQLLDILHQWDLLDKGGSGHHHHHH

SEQ ID NO: 1819 - DNA, 633 bp, synthetic construct
  misc_feature 1..633: note = Variant of 3'O-kinase
  source 1..633: mol_type = other DNA
atggcggttaccattggtttaacaggagggatcgcagcgggcaaatcgactgtgagtgccatgatgcgtgaactgggtctgccggtcatcgatgctgacgaggcagcacgcgccgttatgaagccaggcgaagaagcgtatcgcgacattgtagctgaattcgggccgggcatccttcgtgcggatggcgagatcgatcgcgggaaactgcgtgctatccgcttttcggacgaacaacaacgtaaggtgctgaattcgattgtaggtcctgcagtcctgaagaagatgctcgcggagtgggaagctcatatcgggtcaggcgccaagacggttgtgctggatatcccgctgctgttcgaatccggattgcaatcgtggatggacaaagttctcgtggtgtacgttgatgatgatgttcagttacgccgccttatggcacgtaacgggctgactgaagaagaagctctgatgcgcattgaatcgcagtggcccagtgcggagaaagttaaacgtgcagacgctgtcatcgacaataatggcgtgattgaagatacccgccgccagctgctggacattttacaccagtgggatctgctggacaaaggtggctccggccaccatcatcaccatcac

SEQ ID NO: 1820 - protein, 211 aa, synthetic construct
  REGION 1..211: note = Variant of 3'O-kinase
MAVTIGLTGGIAAGKSTVSAMMRELGLPVIDADEAARAVMKPGEEAYRDIVAEFGPGILRADGEIDRGKLRAIRFSDEQQRKVLNSIVGPAVLKKMLAEWEAHIGSGAKTVVLDIPLLFESGLQSWMDKVLVVYVDDDVQLRRLMARNGLTEEEALMRIESQWPSAEKVKRADAVIDNNGVIEDTRRQLLDILHQWDLLDKGGSGHHHHHH

SEQ ID NO: 1821 - DNA, 633 bp, synthetic construct
  misc_feature 1..633: note = Variant of 3'O-kinase
  source 1..633: mol_type = other DNA
atggcgactaccattggtttaacaggagggatcgcagcgggcaaatcgactgtgagttgcatgatgcgtgaactgggtctgccggtcatcgatgctgacgaggcagcacgcgccgttatgaagccaggcgaagaagcgtatcgcgacattgtagctgaattcgggccgggcatccttcgtgcggatggcgagatcgatcgcgggaaactgcgtgctatctttttttcggacgaacaacaacgtaaggtgctgaattcgattgtaggtcctgcagtcctgaagaagatgctcgcggagtgggaagcttttatcgggtcaggcgccaagacggttgtgctggatatcccgctgctgttcgaatccggattgcaatcgtggatggacaaagttctcgtggtgtacgttgatgatgatgttcagttacgccgccttatggcacgtaacgggtttactgaagaagaagctctgatgcgcattcgttcacagtggcccagtgcggagaaagttaaacgtgcagacgctgtcatcgacaataatggcaatattgaagatacccgccgccagctgctggacattttacaccagtgggatctgctggacaaaggtggctccggccaccatcatcaccatcac

SEQ ID NO: 1822 - protein, 211 aa, synthetic construct
  REGION 1..211: note = Variant of 3'O-kinase
MATTIGLTGGIAAGKSTVSCMMRELGLPVIDADEAARAVMKPGEEAYRDIVAEFGPGILRADGEIDRGKLRAIFFSDEQQRKVLNSIVGPAVLKKMLAEWEAFIGSGAKTVVLDIPLLFESGLQSWMDKVLVVYVDDDVQLRRLMARNGFTEEEALMRIRSQWPSAEKVKRADAVIDNNGNIEDTRRQLLDILHQWDLLDKGGSGHHHHHH

SEQ ID NO: 1823 - DNA, 633 bp, synthetic construct
  misc_feature 1..633: note = Variant of 3'O-kinase
  source 1..633: mol_type = other DNA
atggcggttaccattggtttaacaggaggtatcgcagcgggcaaatcgactgtgagtgccatgatgcgtgaactgggttttccggtcatcgatgctgacgaggcagcacgcgccgttatgaagccaggcgaagaagcgtatcgcgacattgtagctgaattcgggccgggcatccttcgcgcggatggcgagatcgatcgcgggaaactgcgtgctatccgcttttcggacgaacaacaacgtaagcgcctgaattcgattgtaggtcctgcagtcctgaagaagatgctcgcggagtgggaagctcatatcgggtcaggcgccaagacggttgtggccgatatcccgctgctgttcgaatccggattgcaaagttggatggacaaagttctcgtggtgtacgttgatgatgatgttcagttacgccgccttatggcacgtaacgggtttactgaagaagaagctctgatgcgcattcgttcacagtggcccagtgcggagaaagttaaacgtgcagacgctgtcatcgacaataatggcaatattgaagatacccgccgccagctgctggacattttacaccagtgggatctgctggacaaaggtggctccggccaccatcatcaccatcac

SEQ ID NO: 1824 - protein, 211 aa, synthetic construct
  REGION 1..211: note = Variant of 3'O-kinase
MAVTIGLTGGIAAGKSTVSAMMRELGFPVIDADEAARAVMKPGEEAYRDIVAEFGPGILRADGEIDRGKLRAIRFSDEQQRKRLNSIVGPAVLKKMLAEWEAHIGSGAKTVVADIPLLFESGLQSWMDKVLVVYVDDDVQLRRLMARNGFTEEEALMRIRSQWPSAEKVKRADAVIDNNGNIEDTRRQLLDILHQWDLLDKGGSGHHHHHH

SEQ ID NO: 1825 - DNA, 633 bp, synthetic construct
  misc_feature 1..633: note = Variant of 3'O-kinase
  source 1..633: mol_type = other DNA
atggcggttaccattggtttaacaggagggatcgcagcgggcaaatcgactgtgagtgccatgatgcgtgaactgggtctgccggtcatcgatgctgacgaggcagcacgcgccgttatgaagccaggcgaagaagcgtatcgcgacattgtagctgaattcgggccgggcatccttcgtgcggatggcgagatcgatcgcgggaaactgcgtgctatccgcttttcggacgaacaacaacgtaaggtgctgaattcgattgtaggtcctgcagtcctgaagaagatgctcgcggagtgggaagctcatatcgggtcaggcgccaagacggttgtgctggatatcccgctgctgttcgaatccggattgcaatcgtggatggacaaagttctcgtggtgtacgttgatgatgatgttcagttacgccgccttatggcacgtaacgggtttactgaagaagaagctctgatgcgcattcgttcacagtggcccagtgcggagaaagttaaacgtgcagacgctgtcatcgacaataatggcaatattgaagatacccgccgccagctgctggacctgttacaccagtgggatctgctggacaaaggtggctccggccaccatcatcaccatcac

SEQ ID NO: 1826 - protein, 211 aa, synthetic construct
  REGION 1..211: note = Variant of 3'O-kinase
MAVTIGLTGGIAAGKSTVSAMMRELGLPVIDADEAARAVMKPGEEAYRDIVAEFGPGILRADGEIDRGKLRAIRFSDEQQRKVLNSIVGPAVLKKMLAEWEAHIGSGAKTVVLDIPLLFESGLQSWMDKVLVVYVDDDVQLRRLMARNGFTEEEALMRIRSQWPSAEKVKRADAVIDNNGNIEDTRRQLLDLLHQWDLLDKGGSGHHHHHH

SEQ ID NO: 1827 - DNA, 633 bp, synthetic construct
  misc_feature 1..633: note = Variant of 3'O-kinase
  source 1..633: mol_type = other DNA
atggcggttaccattggtttaacaggagggatcgcagcgggcaaatcgactgtgagtgccatgatgcgtgaactgggtctgccggtcatcgatgctgacgaggcagcacgcgccgttatgaagccaggcgaagaagcgtatcgcgacattgtagctgaattcgggccgggcatccttcgtgcggatggcgagatcgatcgcgggaaactgcgtgctatccgcttttcggacgaacaacaacgtaaggtgctgaattcgattgtaggtcctgcagtcctgaagaagatgctcgcggagtgggaagctctgatcgggtcaggcgccaagacggttgtgctggatatcccgctgctgttcgaatccggattgcaatcgtggatggacaaagttctcgtggtgtacgttgatgatgatgttcagttacgccgccttatggcacgtaacgggtttactgaagaagaagctctgatgcgcattcgttcacagtggcccagtgcggagaaagttaaacgtgcagacgctgtcatcgacaataatggcaatccagaagatacccgccgccagctgctggacattttacaccagtgggatctgctggacaaaggtggctccggccaccatcatcaccatcac

SEQ ID NO: 1828 - protein, 211 aa, synthetic construct
  REGION 1..211: note = Variant of 3'O-kinase
MAVTIGLTGGIAAGKSTVSAMMRELGLPVIDADEAARAVMKPGEEAYRDIVAEFGPGILRADGEIDRGKLRAIRFSDEQQRKVLNSIVGPAVLKKMLAEWEALIGSGAKTVVLDIPLLFESGLQSWMDKVLVVYVDDDVQLRRLMARNGFTEEEALMRIRSQWPSAEKVKRADAVIDNNGNPEDTRRQLLDILHQWDLLDKGGSGHHHHHH

SEQ ID NO: 1829 - DNA, 633 bp, synthetic construct
  misc_feature 1..633: note = Variant of 3'O-kinase
  source 1..633: mol_type = other DNA
atggcggttaccattggtttaacaggagggatcgcagcgggcaaatcgactgtgagtgccatgatgcgtgaactgggtctgccggtcatcgatgctgacgaggcagcacgcgccgttatgaaaccaggcgaagaagcgtatcgcgacattgtagctgaattcgggccgggcatccttcgtgcggatggcgagatcgatcgcgggaaactgcgtgccatccgcttttcggacgaacaacaacgtaaggtgctgaattcgattgtaggtcctgcagtcctgaagaagatgctcgcggagtgggaagctcatatcgggtcaggcgccaagacggttgtgctggatatcccgctgctgttcgaatccggattgcagtcgtggatggacaaagttctcgtggtgtacgttgatgatgatgttcagttacgccgccttatggcacgtaacgggctgactgaagaagaagctctgatgcgcattcgctcgcagtggcccagtgcggagaaagttaaacgtgcagacgctgtcatcgacaataatggcagcattgaagatacccgccgccagctgctggacattttacaccagtgggatctgctggacaaaggtggctccggccaccatcatcaccatcac

SEQ ID NO: 1830 - protein, 211 aa, synthetic construct
  REGION 1..211: note = Variant of 3'O-kinase
MAVTIGLTGGIAAGKSTVSAMMRELGLPVIDADEAARAVMKPGEEAYRDIVAEFGPGILRADGEIDRGKLRAIRFSDEQQRKVLNSIVGPAVLKKMLAEWEAHIGSGAKTVVLDIPLLFESGLQSWMDKVLVVYVDDDVQLRRLMARNGLTEEEALMRIRSQWPSAEKVKRADAVIDNNGSIEDTRRQLLDILHQWDLLDKGGSGHHHHHH

SEQ ID NO: 1831 - DNA, 633 bp, synthetic construct
  misc_feature 1..633: note = Variant of 3'O-kinase
  source 1..633: mol_type = other DNA
atggcggttaccattggtttaacaggagggatcgcagcgggcaaatcgactgtgagtgccatgatgcgtgaactgggtctgccggtcatcgatgctgacgaggcagcacgcgccgttatgaagccaggcgaagaagcgtatcgcgacattgtagctgaattcgggccgggcatccttcgtgcggatggcgagatcgatcgcgggaaactgcgtgctatccgcttttcggacgaacaacaacgtaaggtgctgaattcgattgtaggtcctgcagtcctgaagaagatgctcgcggagtgggaagctcatatcgggtcaggcgccaagacggttgtgctggatatcccgctgctgttcgaatccggattgcaatcgtggatggacaaagtactcgtggtgtacgttgatgatgatgttcagttacgccgccttatggcgcgtaacgggtttggggaagaagaagctctgatgcgcattcgttcacagtggccctcggcggagaaagttaaacgtgcagacgctgtcatcgacaataatggcaatattgaagatacccgccgccagctgctggacattttacaccagtgggatctgctggacaaaggtggctccggccaccatcatcaccatcac

SEQ ID NO: 1832 - protein, 211 aa, synthetic construct
  REGION 1..211: note = Variant of 3'O-kinase
MAVTIGLTGGIAAGKSTVSAMMRELGLPVIDADEAARAVMKPGEEAYRDIVAEFGPGILRADGEIDRGKLRAIRFSDEQQRKVLNSIVGPAVLKKMLAEWEAHIGSGAKTVVLDIPLLFESGLQSWMDKVLVVYVDDDVQLRRLMARNGFGEEEALMRIRSQWPSAEKVKRADAVIDNNGNIEDTRRQLLDILHQWDLLDKGGSGHHHHHH

SEQ ID NO: 1833 - DNA, 633 bp, synthetic construct
  misc_feature 1..633: note = Variant of 3'O-kinase
  source 1..633: mol_type = other DNA
atggcggttaccattggtttaacaggaggtatcgcagcgggcaaatcgactgtgagtgccatgatgcgtgaactgggtctgccggtcatcgatgctgacgaggcagcacgcgccgttatgaagccaggcgaagaagcgtatcgcgacattgtagctgaattcgggccgggcatccttgctgcggatggcgagatcgatcgcgggaaactgcgtgctatccgcttttcggacgaacaacaacgtaaggtgctgaattcgattgtaggtcctgcagtcctgaagaagatgctcgcggagtgggaagctcatatcgggtcaggcgccaagacggttgtgctggatatcccgctgctgttcgaatccggattgcaaagttggatggacaaagttctcgtggtgtacgttgatgatgatgttcagttacgccgccttatggcacgtaacgggtttactgaagaagaagctctgatgcgcattcgttcacagtggcccagtgcggagaaagttaaacgtgcagacgctgaaatcgacaataatggcaatattgaagatacccgccgccagctgctggacattttacaccagtgggatctgctggacaaaggtggctccggccaccatcatcaccatcac

SEQ ID NO: 1834 - protein, 211 aa, synthetic construct
  REGION 1..211: note = Variant of 3'O-kinase
MAVTIGLTGGIAAGKSTVSAMMRELGLPVIDADEAARAVMKPGEEAYRDIVAEFGPGILAADGEIDRGKLRAIRFSDEQQRKVLNSIVGPAVLKKMLAEWEAHIGSGAKTVVLDIPLLFESGLQSWMDKVLVVYVDDDVQLRRLMARNGFTEEEALMRIRSQWPSAEKVKRADAEIDNNGNIEDTRRQLLDILHQWDLLDKGGSGHHHHHH

SEQ ID NO: 1835 - DNA, 633 bp, synthetic construct
  misc_feature 1..633: note = Variant of 3'O-kinase
  source 1..633: mol_type = other DNA
atggcggttaccattggtttaacaggagggatcgcagcgggcaaatcgactgtgagtgccatgatgcgtgaactgggtctgccggtcatcgatgctgacgaggcagcacgcgccgttatgaaaccaggcgaagaagcgtatcgcgacattgtagctgaattcgggccgggcatccttcgtgcggatggccgtatcgatcgcgggaaactgcgtgctatccgcttttcggacgaacaacaacgtaaggtgctgaattcgattgtaggtcctgcagtcctgaagaagatgctcgcggagtgggaagctcatatcgggtcaggcgccaagacggttgtgctggatatcccgctgctgttcgaatccggattgcaatcgtggatggacaaagttctcgtggtgtacgttgatgatgatgttcagttacgccgccttatggcacgtaacgggtttactgaagaagaagctctgatgcgcattcgcgtacagtggcccagtgcggagaaagttaaacgtgcagacgctgtcatcgacaataatggcaatattgaagatacccgccgccagctgctggacattttacaccagtgggatctgctggacaaaggtggctccggccaccatcatcaccatcac

SEQ ID NO: 1836 - protein, 211 aa, synthetic construct
  REGION 1..211: note = Variant of 3'O-kinase
MAVTIGLTGGIAAGKSTVSAMMRELGLPVIDADEAARAVMKPGEEAYRDIVAEFGPGILRADGRIDRGKLRAIRFSDEQQRKVLNSIVGPAVLKKMLAEWEAHIGSGAKTVVLDIPLLFESGLQSWMDKVLVVYVDDDVQLRRLMARNGFTEEEALMRIRVQWPSAEKVKRADAVIDNNGNIEDTRRQLLDILHQWDLLDKGGSGHHHHHH

SEQ ID NO: 1837 - DNA, 633 bp, synthetic construct
  misc_feature 1..633: note = Variant of 3'O-kinase
  source 1..633: mol_type = other DNA
atggcggttaccattggtttaacaggagggatcgcagcgggcaaatcgactgtgagtgccatgatgcgtgaactgggtctgccggtcatcgatgctgacgaggcagcacgcgccgttatggcgccaggcgaagaagcgtatcgcgacattgtagctgaattcgggccgggcatccttcgtgcggatggccgtatcgatcgcgggaaactgcgtgctatccgcttttcggacgaacaacaacgtaaggtgctgaattcgattgtaggtcctgcagtcctgaagaagatgctcgcggagtgggaagctatgatcgggtcaggcgccaagacggttgtgctggatattccgggcctgttcgaatccggattgcaatcgtggatggacaaagttctcgtggtgtacgttgatgatgatgttcagttacgccgccttatggcacgtaacgggctgactgaagaagaagctctgatgcgcattaaagtacagtggcccagtgcggagaaagttaaacgtgcagacgctgtcatcgacaataatggcaatattgaagatacccgccgccagctgctggacattttacaccagtgggatctgctggacaaaggtggctccggccaccatcatcaccatcac

SEQ ID NO: 1838 - protein, 211 aa, synthetic construct
  REGION 1..211: note = Variant of 3'O-kinase
MAVTIGLTGGIAAGKSTVSAMMRELGLPVIDADEAARAVMAPGEEAYRDIVAEFGPGILRADGRIDRGKLRAIRFSDEQQRKVLNSIVGPAVLKKMLAEWEAMIGSGAKTVVLDIPGLFESGLQSWMDKVLVVYVDDDVQLRRLMARNGLTEEEALMRIKVQWPSAEKVKRADAVIDNNGNIEDTRRQLLDILHQWDLLDKGGSGHHHHHH

SEQ ID NO: 1839 - DNA, 633 bp, synthetic construct
  misc_feature 1..633: note = Variant of 3'O-kinase
  source 1..633: mol_type = other DNA
atggcggttaccattggtttaacaggagggatcgcagcgggcaaatcgactgtgagtgctatgatgcgtgaactgggtctgccggtcatcgatgctgacgaggcagcacgcgccgttatgaagccaggcgaagaagcgtatcgcgacattgtagctgaattcgggccgggcatccttcgtgcggatggcgagatcgatcgcgggaaactgcgtgctatctttttttcggacgaacaacaacgtaaggtgctgaattcgattgtaggtcctgcagtcctgaagaagatgctcgcggagtgggaagctcacatcgggtcaggcgccaagacggttgtgctggatatcccgctgctgttcgaatccggattgcaatcgtggatggacaaagttctcgtggtgtacgttgatgatgatgttcagttacgccgccttatggcacgtaacgggtttactgaagaagaagctctgatgcgcattcgttcacagtggcccattgcggagaaagttaaacgtgcagacgctgtcatcgacaataatggcaatattgaagatacccgccgccagctgctggacattttacaccagtgggatctgctggacaaaggtggctccggccaccatcatcaccatcac

SEQ ID NO: 1840 - protein, 211 aa, synthetic construct
  REGION 1..211: note = Variant of 3'O-kinase
MAVTIGLTGGIAAGKSTVSAMMRELGLPVIDADEAARAVMKPGEEAYRDIVAEFGPGILRADGEIDRGKLRAIFFSDEQQRKVLNSIVGPAVLKKMLAEWEAHIGSGAKTVVLDIPLLFESGLQSWMDKVLVVYVDDDVQLRRLMARNGFTEEEALMRIRSQWPIAEKVKRADAVIDNNGNIEDTRRQLLDILHQWDLLDKGGSGHHHHHH

SEQ ID NO: 1841 - DNA, 633 bp, synthetic construct
  misc_feature 1..633: note = Variant of 3'O-kinase
  source 1..633: mol_type = other DNA
atggcggttaccattggtttaacaggagggatcgcagcgggcaaatcgactgtgagtgccatgatgcgtgaactgggtctgccggtcatcgatgctgacgaggcagcacgcgccgttatgaaaccaggcgaagaagcgtatcgcgacattgtagctgaattcgggccgggcatccttcgtgcggatggcgagatcgatcgcgggaaactgcgtgacatccgcttttcggacgaacaacaacgtaaggtgctgaattcgattgtaggtcctgcagtcctgaagaagatgctcgcggagtgggaagctatgatcgggtcaggcgccaagacggttgtgctggatatcccgctgctgttcgaatccggattggcctcgtggatggacaaagttctcgtggtgtacgttgatgatgatgttcagttacgccgccttatggcacgtaacgggtttactgaagaagaagctctgatgcgcattaaagtacagtggcccagtgcggagaaagttaaacgtgcagacgctgtcatcgacaataatggcaatattgaagatacccgccgccagctgctggacattttacaccagtgggatctgctggacaaaggtggctccggccaccatcatcaccatcac

SEQ ID NO: 1842 - protein, 211 aa, synthetic construct
  REGION 1..211: note = Variant of 3'O-kinase
MAVTIGLTGGIAAGKSTVSAMMRELGLPVIDADEAARAVMKPGEEAYRDIVAEFGPGILRADGEIDRGKLRDIRFSDEQQRKVLNSIVGPAVLKKMLAEWEAMIGSGAKTVVLDIPLLFESGLASWMDKVLVVYVDDDVQLRRLMARNGFTEEEALMRIKVQWPSAEKVKRADAVIDNNGNIEDTRRQLLDILHQWDLLDKGGSGHHHHHH

SEQ ID NO: 1843 - DNA, 633 bp, synthetic construct
  misc_feature 1..633: note = Variant of 3'O-kinase
  source 1..633: mol_type = other DNA
atggcggttaccattggtttaacaggagggatcgcagcgggcaaatcgactgtgagtgccatgatgcgtgaactgggtctgccggtcatcgatgctgacgaggcagcacgcgccgttatgaagccaggcgaagaagcgtatcgcgacattgtagctgaattcgggccgggcatccttctgcctgatggcgagatcgatcgcgggaaactgcgtgctatccgcttttcggacgaacaacaacgtaaggtgctgaattcgattgtaggtcctgcagtcctgaagaagatgctcgcggagtgggaagctcatatcgggtcaggcgccaagacggttgtgctggatatcccgctgctgttcgaatccggattgcaatcgtggatggacaaagttctcgtggtgtacgttgatgatgatgttcagttacgccgccttatggcacgtaacgggtttactgaagaagaagctctgatgcgcattcgttcacagtggcccagtgcggagaaagttaaacgtgcagacgctgtcatcgacaataatggcaatattgaagatacccgccgccagctgctggacattttacaccagtgggatctgctggacaaaggtggctccggccaccatcatcaccatcac

SEQ ID NO: 1844 - protein, 211 aa, synthetic construct
  REGION 1..211: note = Variant of 3'O-kinase
MAVTIGLTGGIAAGKSTVSAMMRELGLPVIDADEAARAVMKPGEEAYRDIVAEFGPGILLPDGEIDRGKLRAIRFSDEQQRKVLNSIVGPAVLKKMLAEWEAHIGSGAKTVVLDIPLLFESGLQSWMDKVLVVYVDDDVQLRRLMARNGFTEEEALMRIRSQWPSAEKVKRADAVIDNNGNIEDTRRQLLDILHQWDLLDKGGSGHHHHHH

SEQ ID NO: 1845 - DNA, 633 bp, synthetic construct
  misc_feature 1..633: note = Variant of 3'O-kinase
  source 1..633: mol_type = other DNA
atggcggttaccattggtttaacaggaggtatcgcagcgggcaaatcgactgtgagtgccatgatgcgtgaactgggtctgccggtcatcgatgctgacgaggcagcacgcgccgttatgaagccaggcgaagaagcgtatcgcatgattgtagctgaattcgggccgggcatccttcgcgcggatggcgagatcgatcgcagcaaactgcgtgccatccgcttttcggacgaacaacaacgtaaggtgctgaattcgattgtaggtcctgcagtcctgaagaagatgctcgcggagtgggaagctcatatcgggtcaggcgccaagacggttgtgctggatatcccgctgctgttcgaatccggattgcaaagttggatggacaaagttctcgtggtgatggttgatgatgatgttcagttacgccgccttatggcacgtaacgggtttactgaagaagaagctctgatgcgcattcgttcacagtggcccagtgcggagaaagttaaacgtgcagacgctgtaatcgacaataatggcaatattgaagatacccgccgccagctgctggacattttacaccagtgggatctgctggacaaaggtggctccggccaccatcatcaccatcac

SEQ ID NO: 1846 - protein, 211 aa, synthetic construct
  REGION 1..211: note = Variant of 3'O-kinase
MAVTIGLTGGIAAGKSTVSAMMRELGLPVIDADEAARAVMKPGEEAYRMIVAEFGPGILRADGEIDRSKLRAIRFSDEQQRKVLNSIVGPAVLKKMLAEWEAHIGSGAKTVVLDIPLLFESGLQSWMDKVLVVMVDDDVQLRRLMARNGFTEEEALMRIRSQWPSAEKVKRADAVIDNNGNIEDTRRQLLDILHQWDLLDKGGSGHHHHHH

SEQ ID NO: 1847 - DNA, 633 bp, synthetic construct
  misc_feature 1..633: note = Variant of 3'O-kinase
  source 1..633: mol_type = other DNA
atggcggttaccattggtttaacaggagggatcgcagcgggcaaatcgactgtgagtgccatgatgcgtgaactgggtctgccggtcatcgatgctgacgaggcagcacgcgcctgtatgaagccaggcgaagaagcgtatcgcgacattgtagctgaattcgggccgggcatccttcgtgcggatggcgagatcgatcgcgggaaactgcgtgctatccgcttttcggacgaacaacaacgtaaggtgctgaattcgattgtaggtcctgcagtcctgaagaaaatgctcgcggagtgggaagctcatatcgggtcaggcgccaagacggttgtgctggatatcccgctgctgttcgaatccggattgcaatcgtggatggacaaagtactcgtggtgtacgttgatgatgatgttcagttacgccgccttatggcacgtaacgggtttactgaagaagaagctctgatgcgcattcgttcacagtggcccagtgcggagaaagttaaacgtgcagacgctgtcatcgacaataatggcaatattgaagatacccgccgccagctgctggacattttacaccagtgggatctgctggacaaaggtggctccggccaccatcatcaccatcac

SEQ ID NO: 1848 - protein, 211 aa, synthetic construct
  REGION 1..211: note = Variant of 3'O-kinase
MAVTIGLTGGIAAGKSTVSAMMRELGLPVIDADEAARACMKPGEEAYRDIVAEFGPGILRADGEIDRGKLRAIRFSDEQQRKVLNSIVGPAVLKKMLAEWEAHIGSGAKTVVLDIPLLFESGLQSWMDKVLVVYVDDDVQLRRLMARNGFTEEEALMRIRSQWPSAEKVKRADAVIDNNGNIEDTRRQLLDILHQWDLLDKGGSGHHHHHH

SEQ ID NO: 1849 - DNA, 633 bp, synthetic construct
  misc_feature 1..633: note = Variant of 3'O-kinase
  source 1..633: mol_type = other DNA
atggcggttaccattggtttaacaggagggatcgcagcgggcaaatcgactgtgagtgccatgatgcgtgaactgggttttccggtcatcgatgctgacgaggcagcacgcgccgttatgaagccaggcgaagaagcgtatcgccaaattgtagctgaattcgggccgggcatccttcgtgcggatggcgagatcgatcgcggcaaactgcgtgccatccacttttcggacgaacaacaacgtaaggtcctgaattcgattgtaggtcctgcagtcctgaagaagatgctcgcggagtgggaagctcatatcgggtcaggcgccaagacggttgtgctggatatcccgctgctgttcgaatccggattgcaatcgtggatggacaaagttctcgtggtgtacgttgatgatgatgttcagttacgccgccttatggcacgtaacgggtttactgaagaagaagctctgatgcgcattcgttcacagtggcccagtgcggagaaagttaaacgtgcagacgctgtcatcgacaataatggcaatattgaagatacccgccgccagctgctggacattttacaccagtgggatctgctggacaaaggtggctccggccaccatcatcaccatcac

SEQ ID NO: 1850 - protein, 211 aa, synthetic construct
  REGION 1..211: note = Variant of 3'O-kinase
MAVTIGLTGGIAAGKSTVSAMMRELGFPVIDADEAARAVMKPGEEAYRQIVAEFGPGILRADGEIDRGKLRAIHFSDEQQRKVLNSIVGPAVLKKMLAEWEAHIGSGAKTVVLDIPLLFESGLQSWMDKVLVVYVDDDVQLRRLMARNGFTEEEALMRIRSQWPSAEKVKRADAVIDNNGNIEDTRRQLLDILHQWDLLDKGGSGHHHHHH

SEQ ID NO: 1851 - DNA, 633 bp, synthetic construct
  misc_feature 1..633: note = Variant of 3'O-kinase
  source 1..633: mol_type = other DNA
atggcggttaccattggtttaacaggagggatcgcagcgggcaaatcgactgtgagtgccatgatgcgtgaactgggtctgccggtcatcgatgctgacgaggcagcacgcgccgttatgaagccaggcgaagaagcgtatcgcgacattgtagctgaattcgggccgggcatccttcgtgcggatggcgagatcgatcgcgggaaactgcgtgctatccgtttttcggacgaacaacaacgtaaggtgctgaattcgattgtaggtcctgcagtcctgaagaagatgctcgcggagtgggaagctcatatcgggtcaggcgccaagacggttgtgctggatatcccgctgctgttcgaatccggattgcaatcgtggatggacaaagttctcgtggtgtacgttgatgatgatgttcagttacgccgccttatggcacgtaacgggtttactgaagaagaagctctgatgcgcattcgttcacagtggcccagtgcggagaaagttaaacgtgcagacgctgtcatcgacaataatggcaatgaggaagatacccgccgccagctgctggacattttacaccagtgggatctgctggacaaaggtggctccggccaccatcatcaccatcac

SEQ ID NO: 1852 - protein, 211 aa, synthetic construct
  REGION 1..211: note = Variant of 3'O-kinase
MAVTIGLTGGIAAGKSTVSAMMRELGLPVIDADEAARAVMKPGEEAYRDIVAEFGPGILRADGEIDRGKLRAIRFSDEQQRKVLNSIVGPAVLKKMLAEWEAHIGSGAKTVVLDIPLLFESGLQSWMDKVLVVYVDDDVQLRRLMARNGFTEEEALMRIRSQWPSAEKVKRADAVIDNNGNEEDTRRQLLDILHQWDLLDKGGSGHHHHHH

SEQ ID NO: 1853 - DNA, 633 bp, synthetic construct
  misc_feature 1..633: note = Variant of 3'O-kinase
  source 1..633: mol_type = other DNA
atggcggttaccattggtttaacaggaagtatcgcagcgggcaaatcgactgtgagtgccatgatgcgtgaactgggtctgccggtcatcgatgctgacgaggcagcacgcgccgttatgaagccaggcgaagaagcgtatcgcgacattgtagctgaattcgggccgggcatccttcgcgcggatggcgagatcgatcgcgggaaactgcgtgctatccgcttttcggacgaacaacaacgtaagcgcctgaattcgattgtaggtcctgcagtcctgaagaagatgctcgcggagtgggaagctcatatcgggtcaggcgccaagacggttgtgctggatatcccgctgctgttcgaatccggattgcaatcgtggatggacaaagttctcgtggtgtacgttgatgatgatgttcagttacgccgccttatggcacgtaacgggtttactgaagaagaagctctgatgcgcattcgttcacagtggcccagtgcggagaaagttaaacgtgcagacgctgtcatcgacaataatggcaatattgaagatacccgccgccagctgctggacattttacaccagtgggatctgctggacaaaggtggctccggccaccatcatcaccatcac

SEQ ID NO: 1854 - protein, 211 aa, synthetic construct
  REGION 1..211: note = Variant of 3'O-kinase
MAVTIGLTGSIAAGKSTVSAMMRELGLPVIDADEAARAVMKPGEEAYRDIVAEFGPGILRADGEIDRGKLRAIRFSDEQQRKRLNSIVGPAVLKKMLAEWEAHIGSGAKTVVLDIPLLFESGLQSWMDKVLVVYVDDDVQLRRLMARNGFTEEEALMRIRSQWPSAEKVKRADAVIDNNGNIEDTRRQLLDILHQWDLLDKGGSGHHHHHH

SEQ ID NO: 1855 - DNA, 633 bp, synthetic construct
  misc_feature 1..633: note = Variant of 3'O-kinase
  source 1..633: mol_type = other DNA
atggcggttaccattggtttaacaggaggtatcgcagcgggcaaatcgactgtgagtgccatgatggcagaactgggttttccggtcatcgatgctgacgaggcagcacgcgcggttatgaagccaggcgaagaagcgtatcgccaaattgtagctgaattcgggccgggcatccttcgcgcggatggcgagatcgatcgcggcaaactgcgtgccatccgcttttcggacgaacaacaacgtaagcgcctgaattcgattgtaggtcctgcagtcctgaagaagatgctcgcggagtgggaagctcatatcgggtcaggcgccaagacggttgtgctggatatcccgctgctgttcgaatccggattgcaagagtggatggacaaagttctcgtggtgtacgttgatgatgatgttcagattcgccgccttatggcacgtaacgggtttactgaagaagaagctctgatgcgcattcgttcacagtggcccagtgcggagaaagttaaacgtgcagacgctgtcatcgacaataatggcaatattgaagatacccgccgccagctgctggacattttacaccagtgggatctgctggacaaaggtggctccggccaccatcatcaccatcac

SEQ ID NO: 1856 - protein, 211 aa, synthetic construct
  REGION 1..211: note = Variant of 3'O-kinase
MAVTIGLTGGIAAGKSTVSAMMAELGFPVIDADEAARAVMKPGEEAYRQIVAEFGPGILRADGEIDRGKLRAIRFSDEQQRKRLNSIVGPAVLKKMLAEWEAHIGSGAKTVVLDIPLLFESGLQEWMDKVLVVYVDDDVQIRRLMARNGFTEEEALMRIRSQWPSAEKVKRADAVIDNNGNIEDTRRQLLDILHQWDLLDKGGSGHHHHHH

SEQ ID NO: 1857 - DNA, 633 bp, synthetic construct
  misc_feature 1..633: note = Variant of 3'O-kinase
  source 1..633: mol_type = other DNA
atggcggttaccattggtttaacaggagggatcgcagcgggcaaatcgactgtgagtgccatgatgcgtgaactgggtctgccggtcatcgatgctgacgaggcagcacgcgccgttatgaaaccaggcgaagaagcgtatcgcgacattgtagctgaattcgggccgggcatccttcgtgcggatggcgagatcgatcgcgggaaactgcgtgacatccgcttttcggacgaacaacaacgtaaggtgctgaattcgattgtaggtcctgcagtcctgaagaagatgctcgcggagtgggaagctcatatcgggtcaggcgccaagacggttgtgctggatatcccgctgctgttcgaatccggattgtactcgtggatggacaaagttctcgtggtgtacgttgatgatgatgttcagttacgccgccttatggcacgtaacgggctgactgaagaagaagctctgatgcgcattagctcgcagtggcccagtgcggagaaagttaaacgtgcagacgctgtcatcgacaataatggcgtgattgaagatacccgccgccagctgctggacattttacaccagtgggatctgctggacaaaggtggctccggccaccatcatcaccatcac

SEQ ID NO: 1858 - protein, 211 aa, synthetic construct
  REGION 1..211: note = Variant of 3'O-kinase
MAVTIGLTGGIAAGKSTVSAMMRELGLPVIDADEAARAVMKPGEEAYRDIVAEFGPGILRADGEIDRGKLRDIRFSDEQQRKVLNSIVGPAVLKKMLAEWEAHIGSGAKTVVLDIPLLFESGLYSWMDKVLVVYVDDDVQLRRLMARNGLTEEEALMRISSQWPSAEKVKRADAVIDNNGVIEDTRRQLLDILHQWDLLDKGGSGHHHHHH

SEQ ID NO: 1859 - DNA, 633 bp, synthetic construct
  misc_feature 1..633: note = Variant of 3'O-kinase
  source 1..633: mol_type = other DNA
atggcggttaccattggtttaacaggagggatcgcagcgggcaaatcgactgtgagtgccatgatgcgtgaactgggtctgccggtcatcgatgctgacgaggcagcacgcgccgttatgaaaccaggcgaagaagcgtatcgcgacattgtagctgaattcgggccgggcatccttcgtgcggatggcgagatcgatcgcgggaaactgcgtgctatccgcttttcggacgaacaacaacgtaaggtgctgaattcgattgtaggtcctgcagtcctgaagaagatgctcgcggagtgggaagctcatatcgggtcaggcgccaagacggttgtgctggatattccgctgctgttcgaatccggattgcaatcgtggatggacaaagttctcgtggtgtacgttgatgatgatgttcagttacgccgccttatggcacgtaacgggtttactgaagaagaagctctgatgcgcattaaatcgcagtggcccagtgcggagaaagttaaacgtgcagacgctgtcatcgacaataatggcaccattgaagatacccgccgccagctgctggacattttacaccagtgggatctgctggacaaaggtggctccggccaccatcatcaccatcac

SEQ ID NO: 1860 - protein, 211 aa, synthetic construct
  REGION 1..211: note = Variant of 3'O-kinase
MAVTIGLTGGIAAGKSTVSAMMRELGLPVIDADEAARAVMKPGEEAYRDIVAEFGPGILRADGEIDRGKLRAIRFSDEQQRKVLNSIVGPAVLKKMLAEWEAHIGSGAKTVVLDIPLLFESGLQSWMDKVLVVYVDDDVQLRRLMARNGFTEEEALMRIKSQWPSAEKVKRADAVIDNNGTIEDTRRQLLDILHQWDLLDKGGSGHHHHHH

SEQ ID NO: 1861 - DNA, 633 bp, synthetic construct
  misc_feature 1..633: note = Variant of 3'O-kinase
  source 1..633: mol_type = other DNA
atggcggttaccattggtttaacaggagggatcgcagcgggcaaatcgactgtgagtgccatgatgcgtgaactgggtctgccggtcatcgatgctgacgaggcagcacgcgccgttatgaaaccaggcgaagaagcgtatcgcgacattgtagctgaattcgggccgggcatccttcgtgcggatggccgtatcgatcgcgggaaactgcgtgctatccgcttttcggacgaacaacaacgtaaggtgctgaattcgattgtaggtcctgcagtcctgaagaagatgctcgcggagtgggaagctcatatcgggtcaggcgccaagacggttgtgctggatatcccgctgctgttcgaatccggattgcaatcgtggatggacaaagttctcgtggtgtacgttgatgatgatgttcagttacgccgccttatggcacgtaacgggtttactgaagaagaagctctgatgcgcattcgttcacagtggcccagtgcggagaaagttaaacgtgcagacgctgtcatcgacaataatggcaacattgaagatacccgccgccagctgctggacattttacaccagtgggatctgctggacaaaggtggctccggccaccatcatcaccatcac

SEQ ID NO: 1862 - protein, 211 aa, synthetic construct
  REGION 1..211: note = Variant of 3'O-kinase
MAVTIGLTGGIAAGKSTVSAMMRELGLPVIDADEAARAVMKPGEEAYRDIVAEFGPGILRADGRIDRGKLRAIRFSDEQQRKVLNSIVGPAVLKKMLAEWEAHIGSGAKTVVLDIPLLFESGLQSWMDKVLVVYVDDDVQLRRLMARNGFTEEEALMRIRSQWPSAEKVKRADAVIDNNGNIEDTRRQLLDILHQWDLLDKGGSGHHHHHH

SEQ ID NO: 1863 - DNA, 633 bp, synthetic construct
  misc_feature 1..633: note = Variant of 3'O-kinase
  source 1..633: mol_type = other DNA
atggcggttaccattggtttaacaggagggatcgcagcgggcaaatcgactgtgagtgccatgatgcgtgaactgggtctgccggtcatcgatgctgacgaggcagcacgcgccgttatgaagccaggcgaagaagcgtatcgcgacattgtagcggaattcgggccgggcatccttcgccctgatggcgagatcgatcgcgggaaactgcgtgctatccgcttttcggacgaacaacaacgtaaggtgctgaattcgattgtaggtcctgcagtcctgaagaagatgctcgcggagtgggaagctcatatcgggtcaggcgccaaggcggttgtgctggatatcccgctgctgttcgaatccggattgcaatcgtggatggacaaagttctcgtggtgtacgttgatgatgatgttcagttacgccgccttatgcatcgtaacgggtttggggaagaagaagctctgatgcgcattcgttcacagtggcccagtgcggagaaagttaaacgtgcagacgctgtcatcgacaataatggcaatattgaagatacccgccgccagctgctggacattttacaccagtgggatctgctggacaaaggtggctccggccaccatcatcaccatcac

SEQ ID NO: 1864 - protein, 211 aa, synthetic construct
  REGION 1..211: note = Variant of 3'O-kinase
MAVTIGLTGGIAAGKSTVSAMMRELGLPVIDADEAARAVMKPGEEAYRDIVAEFGPGILRPDGEIDRGKLRAIRFSDEQQRKVLNSIVGPAVLKKMLAEWEAHIGSGAKAVVLDIPLLFESGLQSWMDKVLVVYVDDDVQLRRLMHRNGFGEEEALMRIRSQWPSAEKVKRADAVIDNNGNIEDTRRQLLDILHQWDLLDKGGSGHHHHHH

SEQ ID NO: 1865 - DNA, 633 bp, synthetic construct
  misc_feature 1..633: note = Variant of 3'O-kinase
  source 1..633: mol_type = other DNA
atggcggttaccattggtttaacaggaagtatcgcagcgggcaaatcgactgtgagtgccatgatggcagaactgggttttccggtcatcgatgctgacgaggcagcacgctcggttatgaagccaggcgaagaagcgtatcgccaaattgtagctgaattcgggccgggcatccttcgtgcggatggcgagatcgatcgcgggaaactgcgtgctatccgcttttcggacgaacaacaacgtaaggtcctgaattcgattgtaggtcctgcagtcctgaagaagatgctcgcggagtgggaagctcatatcgggtcaggcgccaagacggttgtggccgatatcccgctgctgttcgaatccggattgcaaagttggatggacaaagttctcgtggtgtacgttgatgatgatgttcagctgcgccgccttatggcacgtaacgggtttactgaagaagaagctctgatgcgcattcgttcacagtggcccagtgcggagaaagttaaacgtgcagacgctgtaatcgacaataatggcaatattgaagatacccgccgccagctgctggacattttacaccagtgggatctgctggacaaaggtggctccggccaccatcatcaccatcac

SEQ ID NO: 1866 - protein, 211 aa, synthetic construct
  REGION 1..211: note = Variant of 3'O-kinase
MAVTIGLTGSIAAGKSTVSAMMAELGFPVIDADEAARSVMKPGEEAYRQIVAEFGPGILRADGEIDRGKLRAIRFSDEQQRKVLNSIVGPAVLKKMLAEWEAHIGSGAKTVVADIPLLFESGLQSWMDKVLVVYVDDDVQLRRLMARNGFTEEEALMRIRSQWPSAEKVKRADAVIDNNGNIEDTRRQLLDILHQWDLLDKGGSGHHHHHH

SEQ ID NO: 1867 - DNA, 633 bp, synthetic construct
  misc_feature 1..633: note = Variant of 3'O-kinase
  source 1..633: mol_type = other DNA
atggcggttaccattggtttaacaggaggtatcgcagcgggcaaatcgactgtgagtgccatgatgcgtgaactgggtctgccggtcatcgatgctgacgaggcagcacgcgccgttatgaagccaggcgaagaagcgtatcgcatgattgtagctgaattcgggccgggcatccttgctgcggatggcgagatcgatcgcgggaaactgcgtgctatccgcttttcggacgaacaacaacgtaaggtcctgaattcgattgtaggtcctgcagtcctgaagaagatgctcgcggagtgggaagctcatatcgggtcaggcgccaagacggttgtgctggatatcccgctgctgttcgaatccggattgcaatcgtggatggacaaagttctcgtggtgtacgttgatgatgatgttcagttacgccgccttatggcacgtaacgggtttactgaagaagaagctctgatgcgcattcgttcacagtggcccagtgcggagaaagttaaacgtgcagacgctgtaatcgacaataatggcaatattgaagatacccgccgccagctgctggacattttacaccagtgggatctgctggacaaaggtggctccggccaccatcatcaccatcac

SEQ ID NO: 1868 - protein, 211 aa, synthetic construct
  REGION 1..211: note = Variant of 3'O-kinase
MAVTIGLTGGIAAGKSTVSAMMRELGLPVIDADEAARAVMKPGEEAYRMIVAEFGPGILAADGEIDRGKLRAIRFSDEQQRKVLNSIVGPAVLKKMLAEWEAHIGSGAKTVVLDIPLLFESGLQSWMDKVLVVYVDDDVQLRRLMARNGFTEEEALMRIRSQWPSAEKVKRADAVIDNNGNIEDTRRQLLDILHQWDLLDKGGSGHHHHHH

SEQ ID NO: 1869 - DNA, 633 bp, synthetic construct
  misc_feature 1..633: note = Variant of 3'O-kinase
  source 1..633: mol_type = other DNA
atggcggttaccattggtttaacaggaggtatcgcagcgggcaaatcgactgtgagtgccatgatgcgtgaactgggtctgccggtcatcgatgctgacgaggcagcacgcgcggttatgaagccaggcgaagaagcgtatcgccaaattgtagctgaattcgggccgggcatccttcgcgcggatggcgcgatcgatcgcgggaaactgcgtgctatccgcttttcggacgaacaacaacgtaaggtcctgaattcgattgtaggtcctgcagtcctgaagaagacgctcgcggagtgggaagctcatatcgggtcaggcgccaagacggttgtggccgatatcccgctgctgttcgaatccggattgcaatcgtggatggacaaagttctcgtggtgtacgttgatgatgatgttcagttacgccgccttatggcacgtaacgggtttactgaagaagaagctctgatgcgcattcgttcacagtggcccagtgcggagaaagttaaacgtgcagacgctgaaatcgacaataatggcaatattgaagatacccgccgccagctgctggacattttacaccagtgggatctgctggacaaaggtggctccggccaccatcatcaccatcac

SEQ ID NO: 1870 - protein, 211 aa, synthetic construct
  REGION 1..211: note = Variant of 3'O-kinase
MAVTIGLTGGIAAGKSTVSAMMRELGLPVIDADEAARAVMKPGEEAYRQIVAEFGPGILRADGAIDRGKLRAIRFSDEQQRKVLNSIVGPAVLKKTLAEWEAHIGSGAKTVVADIPLLFESGLQSWMDKVLVVYVDDDVQLRRLMARNGFTEEEALMRIRSQWPSAEKVKRADAEIDNNGNIEDTRRQLLDILHQWDLLDKGGSGHHHHHH

SEQ ID NO: 1871 - DNA, 633 bp, synthetic construct
  misc_feature 1..633: note = Variant of 3'O-kinase
  source 1..633: mol_type = other DNA
atggcggttaccattggtttaacaggagggatcgcagcgggcaaatcgactgtgagtgccatgatgcgtgaactgggtctgccggtcatcgatgctgacgaggcagcacgcgccgttatgaagccaggcgaagaagcgtatcgcgacattgtagctgaattcgggccgggcatccttcgccctgatggcgagatcgatcgcgggaaactgcgtgctatccgcttttcggacgaacaacaacgtaaggtgctgaattcgattgtaggtcctgcagtcctgaagaagatgctcgcggagtgggaagctcatatcgggtcaggcgccaaggcggttgtgctggatatcccgctgctgttcgaatccggattgcaatcgtggatggacaaagttctcgtggtgtacgttgatgatgatgttcagttacgccgccttatggcacgtaacgggtttactgaagaagaagctctgatgcgcattcgttcacagtggccccaagcggagaaagttaaacgtgcagacgctgtcatcgacaataatggcaatattgaagatacccgccgccagctgctggacattttacaccagtgggatctgctggacaaaggtggctccggccaccatcatcaccatcac

SEQ ID NO: 1872 - protein, 211 aa, synthetic construct
  REGION 1..211: note = Variant of 3'O-kinase
MAVTIGLTGGIAAGKSTVSAMMRELGLPVIDADEAARAVMKPGEEAYRDIVAEFGPGILRPDGEIDRGKLRAIRFSDEQQRKVLNSIVGPAVLKKMLAEWEAHIGSGAKAVVLDIPLLFESGLQSWMDKVLVVYVDDDVQLRRLMARNGFTEEEALMRIRSQWPQAEKVKRADAVIDNNGNIEDTRRQLLDILHQWDLLDKGGSGHHHHHH

SEQ ID NO: 1873 - DNA, 633 bp, synthetic construct
  misc_feature 1..633: note = Variant of 3'O-kinase
  source 1..633: mol_type = other DNA
atggcggttaccattggtttaacaggagggatcgcagcgggcaaatcgactgtgagttgcatgatgcgtgaactgggtctgccggtcatcgatgctgacgaggcagcacgcgccgttatgaagccaggcgaagaagcgtatcgcgacattgtagctgaattcgggccgggcatccttcgtgcggatggcgagatcgatcgcgggaaactgcgtgctatccgcttttcggacgaacaacaacgtaaggtgctgaattcgattgtaggtcctgcagtcctgaagaagatgctcgcggagtgggaagctctgatcgggtcaggcgccaagacggttgtgctggatatcccgctgctgttcgaatccggattgcaatcgtggatggacaaagttctcgtggtgtacgttgatgatgatgttcagttacgccgccttatggcacgtaacgggtttactgaagaagaagctctgatgcgcattcgttcacagtggcccagtgcggagaaagttaaacgtgcagacgctgtcatcgacaataatggcaatattgaagatacccgccgccagctgctggacctgttacaccagtgggatctgctggacaaaggtggctccggccaccatcatcaccatcac

SEQ ID NO: 1874 - protein, 211 aa, synthetic construct
  REGION 1..211: note = Variant of 3'O-kinase
MAVTIGLTGGIAAGKSTVSCMMRELGLPVIDADEAARAVMKPGEEAYRDIVAEFGPGILRADGEIDRGKLRAIRFSDEQQRKVLNSIVGPAVLKKMLAEWEALIGSGAKTVVLDIPLLFESGLQSWMDKVLVVYVDDDVQLRRLMARNGFTEEEALMRIRSQWPSAEKVKRADAVIDNNGNIEDTRRQLLDLLHQWDLLDKGGSGHHHHHH

SEQ ID NO: 1875 - DNA, 633 bp, synthetic construct
  misc_feature 1..633: note = Variant of 3'O-kinase
  source 1..633: mol_type = other DNA
atggcggttaccattggtttaacaggagggatcgcagcgggcaaatcgactgtgagtgccatgatgcgtgaactgggtctgccggtcatcgatgctgacgaggcagcacgcgccgttatgaagccaggcgaagaagcgtatcgcgacattgtatcggaattcgggccgggcatccttcgccctgatggcgagatcgatcgcgggaaactgcgtgctatccgcttttcggacgaacaacaacgtaaggtgctgaattcgattgtaggtcctgcagtcctgaagaagatgctcgcggagtgggaagctcatatcgggtcaggcgccaagacggttgtgctggatatcccgctgctgttcgaatccggattgcaatcgtggatggacaaagttctcgtggtgtacgttgatgatgatgttcagttacgccgccttatggcacgtaacgggtttactgaagaagaagctctgatgcgcattcgttcacagtggcccagtgcggagaaagttaaacgtgcagacgctgtcatcgacaataatggcaatattgaagatacccgccgccagctgctggacattttacaccagtgggatctgctggacaaaggtggctccggccaccatcatcaccatcac

SEQ ID NO: 1876 - protein, 211 aa, synthetic construct
  REGION 1..211: note = Variant of 3'O-kinase
MAVTIGLTGGIAAGKSTVSAMMRELGLPVIDADEAARAVMKPGEEAYRDIVSEFGPGILRPDGEIDRGKLRAIRFSDEQQRKVLNSIVGPAVLKKMLAEWEAHIGSGAKTVVLDIPLLFESGLQSWMDKVLVVYVDDDVQLRRLMARNGFTEEEALMRIRSQWPSAEKVKRADAVIDNNGNIEDTRRQLLDILHQWDLLDKGGSGHHHHHH

SEQ ID NO: 1877 - DNA, 633 bp, synthetic construct
  misc_feature 1..633: note = Variant of 3'O-kinase
  source 1..633: mol_type = other DNA
atggcggttaccattggtttaacaggagggatcgcagcgggcaaatcgactgtgagtgccatgatgcgtgaactgggtctgccggtcatcgatgctgacgaggcagcacgcgccgttatgaaaccaggcgaagaagcgtatcgcgacattgtagctgaattcgggccgggcatccttcgtgcggatggcgagatcgatcgcgggaaactgcgtgacatccgcttttcggacgaacaacaacgtaaggtgctgaattcgattgtaggtcctgcagtcctgaagaagatgctcgcggagtgggaagctcatatcgggtcaggcgccaagacggttgtgctggatatcccgctgctgttcgaatccggattgcaatcgtggatggacaaagttctcgtggtgtacgttgatgatgatgttcagttacgccgccttatggcacgtaacgggtttactgaagaagaagctctgatgcgcattcgttcacagtggcccagtgcggagaaagttaaacgtgcagacgctgtcatcgacaataatggcaatattgaagatacccgccgccagctgctggacattttacaccagtgggatctgctggacaaaggtggctccggccaccatcatcaccatcac

SEQ ID NO: 1878 - protein, 211 aa, synthetic construct
  REGION 1..211: note = Variant of 3'O-kinase
MAVTIGLTGGIAAGKSTVSAMMRELGLPVIDADEAARAVMKPGEEAYRDIVAEFGPGILRADGEIDRGKLRDIRFSDEQQRKVLNSIVGPAVLKKMLAEWEAHIGSGAKTVVLDIPLLFESGLQSWMDKVLVVYVDDDVQLRRLMARNGFTEEEALMRIRSQWPSAEKVKRADAVIDNNGNIEDTRRQLLDILHQWDLLDKGGSGHHHHHH

SEQ ID NO: 1879 - DNA, 633 bp, synthetic construct
  misc_feature 1..633: note = Variant of 3'O-kinase
  source 1..633: mol_type = other DNA
atggcggttaccattggtttaacaggagggatcgcagcgggcaaatcgactgtgagtgccatgatgcgtgaactgggtctgccggtcatcgatgctgacgaggcagcacgcgccgttatgaagccaggcgaagaagcgtatcgcgacattgtagctgaattcgggccgggcatccttcgtgcggatggcgagatcgatcgcgagaaactgcgtgctatccgcttttcggacgaacaacaacgtaaggtgctgaattcgattgtaggtcctgcagtcctgaagaagatgctcgcggagtgggaagctcatatcgggtcaggcgccaagacggttgtgctggatatcccgctgctgttcgaatccggattgcaatcgtggatggacaaagttctcgtggtgtacgttgatgatgatgttcagttacgccgccttatggcacgtaacgggtttactgaagaagaagctctgatgcgcattcgttcacagtggcccagtgcggagaaagttaaacgtgcagacgctgtcatcgacaataatggcaatattgaagatacccgccgccagctgctggacattttacaccagtgggatctgctggacaaaggtggctccggccaccatcatcaccatcac

SEQ ID NO: 1880 - protein, 211 aa, synthetic construct
  REGION 1..211: note = Variant of 3'O-kinase
MAVTIGLTGGIAAGKSTVSAMMRELGLPVIDADEAARAVMKPGEEAYRDIVAEFGPGILRADGEIDREKLRAIRFSDEQQRKVLNSIVGPAVLKKMLAEWEAHIGSGAKTVVLDIPLLFESGLQSWMDKVLVVYVDDDVQLRRLMARNGFTEEEALMRIRSQWPSAEKVKRADAVIDNNGNIEDTRRQLLDILHQWDLLDKGGSGHHHHHH

SEQ ID NO: 1881 - DNA, 633 bp, synthetic construct
  misc_feature 1..633: note = Variant of 3'O-kinase
  source 1..633: mol_type = other DNA
atggcggttaccattggtttaacaggagggatcgcagcgggcaaatcgactgtgagtgccatgatgcgtgaactgggtctgccggtcatcgatgctgacgaggcagcacgcgccgttatgaagccaggcgaagaagcgtatcgcgacattgtagctgaattcgggccgggcatccttcgtgcggatggcgagatcgatcgcgggaaactgcgtgctatccgcttttcggacgaacaacaacgtaaggtgctgaattcgattgtaggtcctgcagtcctgaagaagatgctcgcggagtgggaagctcatatcgggtcaggcgccaagacggttgtgctggatatcccgctgctgttcgaatccggattgcaatcgtggatggacaaagttctcgtggtgtacgttgatgatgatgttcagttacgccgccttatggcacgtggggggtttactgaagaagaagctctgatgcgcattcgttcacagtggcccagtgcggagaaagttaaacgtgcagacgctgtcatcgacaataatggcaatattgaagatacccgccgccagctgctggacattttacaccagtgggatctgctggacaaaggtggctccggccaccatcatcaccatcac

SEQ ID NO: 1882 - protein, 211 aa, synthetic construct
  REGION 1..211: note = Variant of 3'O-kinase
MAVTIGLTGGIAAGKSTVSAMMRELGLPVIDADEAARAVMKPGEEAYRDIVAEFGPGILRADGEIDRGKLRAIRFSDEQQRKVLNSIVGPAVLKKMLAEWEAHIGSGAKTVVLDIPLLFESGLQSWMDKVLVVYVDDDVQLRRLMARGGFTEEEALMRIRSQWPSAEKVKRADAVIDNNGNIEDTRRQLLDILHQWDLLDKGGSGHHHHHH

SEQ ID NO: 1883 - DNA, 633 bp, synthetic construct
  misc_feature 1..633: note = Variant of 3'O-kinase
  source 1..633: mol_type = other DNA
atggcggttaccattggtttaacaggagggatcgcagcgggcaaatcgactgtgagtgccatgatgcgtgaactgggtctgccggtcatcgatgctgacgaggcagcacgcgccgttatgaagccaggcgaagaagcgtatcgcgacattgtagctgaattcgggccgggcatccttcgtgcggatggcgagatcgatcgcgggaaactgcgtgctatccgcttttcggacgaacaacaacgtaaggtgctgaattcgattgtaggtcctgcagtcctgaagaagatgctcgcggagtgggaagctcatatcgggtcaggcgccaagacggttgtgctggatatcccgctgctgttcgaatccggattgcaatcgtggatggacaaagttctcgtggtgtacgttgatgatgatgttcagttacgccgccttatggcacgtaacgggcttactgaagaagaagctctgatgcgcattcgttcacagtggcccagtgcggagaaagttaaacgtgcagacgctgtcatcgacaataatggcaatattgaagatacccgccgccagctgctggacattttacaccagtgggatctgctggacaaaggtggctccggccaccatcatcaccatcac

SEQ ID NO: 1884 - protein, 211 aa, synthetic construct
  REGION 1..211: note = Variant of 3'O-kinase
MAVTIGLTGGIAAGKSTVSAMMRELGLPVIDADEAARAVMKPGEEAYRDIVAEFGPGILRADGEIDRGKLRAIRFSDEQQRKVLNSIVGPAVLKKMLAEWEAHIGSGAKTVVLDIPLLFESGLQSWMDKVLVVYVDDDVQLRRLMARNGLTEEEALMRIRSQWPSAEKVKRADAVIDNNGNIEDTRRQLLDILHQWDLLDKGGSGHHHHHH

SEQ ID NO: 1885 - DNA, 633 bp, synthetic construct
  misc_feature 1..633: note = Variant of 3'O-kinase
  source 1..633: mol_type = other DNA
atggcggttaccattggtttaacaggagggatcgcagcgggcaaatcgactgtgagtgccatgatgcgtgaactgggtctgccggtcatcgatgctgacgaggcagcacgcgccgttatgaagccaggcgaagaagcgtatcgcgacattgtagctgaattcgggccgggcatccttcgtgcggatggcgagatcgatcgcgggaaactgcgtgctatccgcttttcggacgaacaacaacgtaaggtgctgaattcgattgtaggtcctgcagtcctgaagaagatgctcgcggagtgggaagctcatatcgggtcaggcgccaagacggttgtgctggatatcccgctgctgttcgaatccggattgcaatcgtggatggacaaagttctcgtggtgtacgttgatgatgatgttcagttacgccgccttatggcacgtaacgggtttactgaagaagaagctctgatgcgcattcgttcacagtggcccagtgcggagaaagttaaacgtgcagacgctgtcatcgacaataatggcaatagggaagatacccgccgccagctgctggacattttacaccagtgggatctgctggacaaaggtggctccgaccaccatcatcaccatcac

SEQ ID NO: 1886 - protein, 211 aa, synthetic construct
  REGION 1..211: note = Variant of 3'O-kinase
MAVTIGLTGGIAAGKSTVSAMMRELGLPVIDADEAARAVMKPGEEAYRDIVAEFGPGILRADGEIDRGKLRAIRFSDEQQRKVLNSIVGPAVLKKMLAEWEAHIGSGAKTVVLDIPLLFESGLQSWMDKVLVVYVDDDVQLRRLMARNGFTEEEALMRIRSQWPSAEKVKRADAVIDNNGNREDTRRQLLDILHQWDLLDKGGSDHHHHHH

SEQ ID NO: 1887 - DNA, 633 bp, synthetic construct
  misc_feature 1..633: note = Variant of 3'O-kinase
  source 1..633: mol_type = other DNA
atggcggttaccattggtttaacaggagggatcgcagcgggcaaatcgactgtgagtgccatgatgcgtgaactgggtctgccggtcatcgatgctgacgaggcagcacgcgccgttatgaagccaggcgaagaagcgtatcgcgacattgtagctgaattcgggccgggcatccttcgtgcggatggcgagatcgatcgcgggaaactgcgtgctatccgcctgtcggacgaacaacaacgtaaggtgctgaattcgattgtaggtcctgcagtcctgaagaagatgctcgcggagtgggaagctcatatcgggtcaggcgccaagacggttgtgctggatatcccgctgctgttcgaatccggattgcaatcgtggatggacaaagttctcgtggtgtacgttgatgatgatgttcagttacgccgccttatggcacgtaacgggtttactgaagaagaagctctgatgcgcattcgttcacagtggcccagtgcggagaaagttaaacgtgcagacgctgtcatcgacaataatggcaatattgaagatacccgccgccagctgctggacattttacaccagtgggatctgctggacaaaggtggctccggccaccatcatcaccatcac

SEQ ID NO: 1888 - protein, 211 aa, synthetic construct
  REGION 1..211: note = Variant of 3'O-kinase
MAVTIGLTGGIAAGKSTVSAMMRELGLPVIDADEAARAVMKPGEEAYRDIVAEFGPGILRADGEIDRGKLRAIRLSDEQQRKVLNSIVGPAVLKKMLAEWEAHIGSGAKTVVLDIPLLFESGLQSWMDKVLVVYVDDDVQLRRLMARNGFTEEEALMRIRSQWPSAEKVKRADAVIDNNGNIEDTRRQLLDILHQWDLLDKGGSGHHHHHH

SEQ ID NO: 1889 - DNA, 633 bp, synthetic construct
  misc_feature 1..633: note = Variant of 3'O-kinase
  source 1..633: mol_type = other DNA
atggcggttaccattggtttaacaggagggatcgcagcgggcaaaactactgtgagtgccatgatgcgtgaactgggtctgccggtcatcgatgctgacgaggcagcacgcgccgttatgaagccaggcgaagaagcgtatcgcgacattgtagctgaattcgggccgggcatccttcgtgcggatggcgagatcgatcgcgggaaactgcgtgctatccgcttttcggacgaacaacaacgtaaggtgctgaattcgattgtaggtcctgcagtcctgaagaagatgctcgcggagtgggaagctcatatcgggtcaggcgccaagacggttgtgctggatatcccgctgctgttcgaatccggattgcaatcgtggatggacaaagttctcgtggtgtacgttgatgatgatgttcagttacgccgccttatggcacgtaacgggtttactgaagaagaagctctgatgcgcattcgttcacagtggcccagtgcggagaaagttaaacgtgcagacgctgtcatcgacaataatggcaatattgaagatacccgccgccagctgctggacattttacaccagtgggatctgctggacaaaggtggctccggccaccatcatcaccatcac

SEQ ID NO: 1890 - protein, 211 aa, synthetic construct
  REGION 1..211: note = Variant of 3'O-kinase
MAVTIGLTGGIAAGKTTVSAMMRELGLPVIDADEAARAVMKPGEEAYRDIVAEFGPGILRADGEIDRGKLRAIRFSDEQQRKVLNSIVGPAVLKKMLAEWEAHIGSGAKTVVLDIPLLFESGLQSWMDKVLVVYVDDDVQLRRLMARNGFTEEEALMRIRSQWPSAEKVKRADAVIDNNGNIEDTRRQLLDILHQWDLLDKGGSGHHHHHH

SEQ ID NO: 1891 - DNA, 633 bp, synthetic construct
  misc_feature 1..633: note = Variant of 3'O-kinase
  source 1..633: mol_type = other DNA
atggcggttaccattggtttaacaggagggatcgcagcgggcaaatcgactgtgagtgccatgatgcgtgaactgggtctgccggtcatcgatgctgacgaggcagcacgcgccgttatgaagccaggcgaagaagcgtatcgcgacattgtagctgaattcgggccgggcatccttcgtgcggatggcgagatcgatcgcgggaaactgcgtgctatccgcttttcggacgaacaacaacgtaaggtgctgaattcgattgtaggtcctgcagtcctgaagaagatgctcgcggagtgggaagctcatatcgggtcaggcgccaagacggttgtgctggatatcccgctgctgttcgaatccggattgcaatcgtggatggacaaagttctcgtggtgtacgttgatgatgatgttcagttacgccgccttatggcacgtaacgggtttccggaagaagaagctctgatgcgcattcgttcacagtggcccagtgcggagaaagttaaacgtgcagacgctgtcatcgacaataatggcaatattgaagatacccgccgccagctgctggacattttacaccagtgggatctgctggacaaaggtggctccggccaccatcatcaccatcac

SEQ ID NO: 1892 - protein, 211 aa, synthetic construct
  REGION 1..211: note = Variant of 3'O-kinase
MAVTIGLTGGIAAGKSTVSAMMRELGLPVIDADEAARAVMKPGEEAYRDIVAEFGPGILRADGEIDRGKLRAIRFSDEQQRKVLNSIVGPAVLKKMLAEWEAHIGSGAKTVVLDIPLLFESGLQSWMDKVLVVYVDDDVQLRRLMARNGFPEEEALMRIRSQWPSAEKVKRADAVIDNNGNIEDTRRQLLDILHQWDLLDKGGSGHHHHHH

SEQ ID NO: 1893 - DNA, 633 bp, synthetic construct
  misc_feature 1..633: note = Variant of 3'O-kinase
  source 1..633: mol_type = other DNA
atggcggttaccattggtttaacaggagggatcgcagcgggcaaatcgactgtgagtgccatgatgcgtgaactgggtctgccggtcatcgatgctgacgaggcagcacgcgccgttatgaagccaggcgaagaagcgtatcgcgacattgtagctgaattcgggccgggcatccttcgtgcggatggcgagatcgatcgcgggaaactgcgtgctatccgcttttcggacgaacaacaacgtaaggtgctgaattcgattgtaggtcctgcagtcctgaagaagatgctcgcggagtgggaagctcatatcgggtcaggcgccaagacggttgtgctggatatcccgctgctgttcgaatccggattgcaatcgtggatggacaaagttctcgtggtgtacgttgatgatgatgttcagttacgccgccttatggcacgtaacgggtttactgaagaagaagctctgatgcgcattcgttcacagtggccccaggcggagaaagttaaacgtgcagacgctgtcatcgacaataatggcaatattgaagatacccgccgccagctgctggacattttacaccagtgggatctgctggacaaaggtggctccggccaccatcatcaccatcac

SEQ ID NO: 1894 - protein, 211 aa, synthetic construct
  REGION 1..211: note = Variant of 3'O-kinase
MAVTIGLTGGIAAGKSTVSAMMRELGLPVIDADEAARAVMKPGEEAYRDIVAEFGPGILRADGEIDRGKLRAIRFSDEQQRKVLNSIVGPAVLKKMLAEWEAHIGSGAKTVVLDIPLLFESGLQSWMDKVLVVYVDDDVQLRRLMARNGFTEEEALMRIRSQWPQAEKVKRADAVIDNNGNIEDTRRQLLDILHQWDLLDKGGSGHHHHHH

SEQ ID NO: 1895 - DNA, 633 bp, synthetic construct
  misc_feature 1..633: note = Variant of 3'O-kinase
  source 1..633: mol_type = other DNA
atggcggttaccattggtttaacaggagggatcgcagcgggcaaatcgactgtgagtaggatgatgcgtgaactgggtctgccggtcatcgatgctgacgaggcagcacgcgccgttatgaagccaggcgaagaagcgtatcgcgacattgtagctgaattcgggccgggcatccttcgtgcggatggcgagatcgatcgcgggaaactgcgtgctatccgcttttcggacgaacaacaacgtaaggtgctgaattcgattgtaggtcctgcagtcctgaagaagatgctcgcggagtgggaagctcatatcgggtcaggcgccaagacggttgtgctggatatcccgctgctgttcgaatccggattgcaatcgtggatggacaaagttctcgtggtgtacgttgatgatgatgttcagttacgccgccttatggcacgtaacgggtttactgaagaagaagctctgatgcgcattcgttcacagtggcccagtgcggagaaagttaaacgtgcagacgctgtcatcgacaataatggcaatattgaagatacccgccgccagctgctggacattttacaccagtgggatctgctggacaaaggtggctccggccaccatcatcaccatcac

SEQ ID NO: 1896 - protein, 211 aa, synthetic construct
  REGION 1..211: note = Variant of 3'O-kinase
MAVTIGLTGGIAAGKSTVSRMMRELGLPVIDADEAARAVMKPGEEAYRDIVAEFGPGILRADGEIDRGKLRAIRFSDEQQRKVLNSIVGPAVLKKMLAEWEAHIGSGAKTVVLDIPLLFESGLQSWMDKVLVVYVDDDVQLRRLMARNGFTEEEALMRIRSQWPSAEKVKRADAVIDNNGNIEDTRRQLLDILHQWDLLDKGGSGHHHHHH

SEQ ID NO: 1897 - DNA, 633 bp, synthetic construct
  misc_feature 1..633: note = Variant of 3'O-kinase
  source 1..633: mol_type = other DNA
atggcggttaccattggtttaacaggagggatcgcagcgggcaaatcgactgtgagtgccatgatgcgtgaactgggtctgccggtcatcgatgctgacgaggcagcacgcgccgttatgaagccaggcgaagaagcgtatcgcgacattgtagctgaattcgggccgggcatccttcgtgcggatggcgagatcgatcgcgggaaactgcgtgctatccgcttttcggacgaacaacaacgtaaggtgctgaattcgattgtaggtcctgcagtcgtgaagaagatgctcgcggagtgggaagctcatatcgggtcaggcgccaagacggttgtgctggatatcccgctgctgttcgaatccggattgcaatcgtggatggacaaagttctcgtggtgtacgttgatgatgatgttcagttacgccgccttatggcacgtaacgggtttactgaagaagaagctctgatgcgcattcgttcacagtggcccagtgcggagaaagttaaacgtgcagacgctgtcatcgacaataatggcaatattgaagatacccgccgccagctgctggacattttacaccagtgggatctgctggacaaaggtggctccggccaccatcatcaccatcac

SEQ ID NO: 1898 - protein, 211 aa, synthetic construct
  REGION 1..211: note = Variant of 3'O-kinase
MAVTIGLTGGIAAGKSTVSAMMRELGLPVIDADEAARAVMKPGEEAYRDIVAEFGPGILRADGEIDRGKLRAIRFSDEQQRKVLNSIVGPAVVKKMLAEWEAHIGSGAKTVVLDIPLLFESGLQSWMDKVLVVYVDDDVQLRRLMARNGFTEEEALMRIRSQWPSAEKVKRADAVIDNNGNIEDTRRQLLDILHQWDLLDKGGSGHHHHHH

SEQ ID NO: 1899 - DNA, 633 bp, synthetic construct
  misc_feature 1..633: note = Variant of 3'O-kinase
  source 1..633: mol_type = other DNA
atggcggttaccattggtttaacaggagggatcgcagcgggcaaatcgactgtgagtgccatgatgcgtgaactgggtctgccggtcatcgatgctgacgaggcagcacgcgccgttatgaagccaggcgaagaagcgtatcgcgacattgtagctgaattcgggccgggcatccttcgtgcggatggcgagatcgatcgcgggaaactgcgtgctatccgcttttcggacgaacaacaacgtaaggtgctgaattcgattgtaggtcctgcagtcctgaagaagatgctcgcggagtgggaagctcatatcgggtcaggcgccaagacggttgtgctggatatcccgctgctgttcgaatccgagttgcaatcgtggatggacaaagttctcgtggtgtacgttgatgatgatgttcagttacgccgccttatggcacgtaacgggtttactgaagaagaagctctgatgcgcattcgttcacagtggcccagtgcggagaaagttaaacgtgcagacgctgtcatcgacaataatggcaatattgaagatacccgccgccagctgctggacattttacaccagtgggatctgctggacaaaggtggctccggccaccatcatcaccatcac

SEQ ID NO: 1900 - protein, 211 aa, synthetic construct
  REGION 1..211: note = Variant of 3'O-kinase
MAVTIGLTGGIAAGKSTVSAMMRELGLPVIDADEAARAVMKPGEEAYRDIVAEFGPGILRADGEIDRGKLRAIRFSDEQQRKVLNSIVGPAVLKKMLAEWEAHIGSGAKTVVLDIPLLFESELQSWMDKVLVVYVDDDVQLRRLMARNGFTEEEALMRIRSQWPSAEKVKRADAVIDNNGNIEDTRRQLLDILHQWDLLDKGGSGHHHHHH

SEQ ID NO: 1901 - DNA, 633 bp, synthetic construct
  misc_feature 1..633: note = Variant of 3'O-kinase
  source 1..633: mol_type = other DNA
atggcggttaccattggtttaacaggagggatcgcagcgggcaaatcgactgtgagtgccatgatgcgtgaactgggtctgccggtcatcgatgctgacgaggcagcacgcgccgttatgaagccaggcgaagaagcgtatcgcgacattgtagctgaattcgggccgggcatccttcgtgcggatggcgagatcgatcgcgggaaactgcgtgctatccgcttttcggacgaacaacaacgtaaggtgctgaattcgattgtaggtcctgcagtcctgaagaagatgctcgcggagtgggaagctcatatcgggtcaggcgccaagacggttgtgctggatatcccgctgctgttcgaatccggattgcaatcgtggatggacaaagttctcgtggtgtacgttgatgatgatgttcagttacgccgccttatggcacgtaacgggtttactgaagaagaagctctgatgcgcattcgttcacagtggcccagtgcggagaaagttaaacgtgcagacgctgtcatcgacaataatggcaatcgggaagatacccgccgccagctgctggacattttacaccagtgggatctgctggacaaaggtggctccggccaccatcatcaccatcac

SEQ ID NO: 1902 - protein, 211 aa, synthetic construct
  REGION 1..211: note = Variant of 3'O-kinase
MAVTIGLTGGIAAGKSTVSAMMRELGLPVIDADEAARAVMKPGEEAYRDIVAEFGPGILRADGEIDRGKLRAIRFSDEQQRKVLNSIVGPAVLKKMLAEWEAHIGSGAKTVVLDIPLLFESGLQSWMDKVLVVYVDDDVQLRRLMARNGFTEEEALMRIRSQWPSAEKVKRADAVIDNNGNREDTRRQLLDILHQWDLLDKGGSGHHHHHH

SEQ ID NO: 1903 - DNA, 633 bp, synthetic construct
  misc_feature 1..633: note = Variant of 3'O-kinase
  source 1..633: mol_type = other DNA
atggcggttaccattggtttaacaggagggatcgcagcgggcaaatcgactgtgagtgccatgatgcgtgaactgggtctgccggtcatcgatgctgacgaggcagcacgcgccgttatgaagccaggcgaagaagcgtatcgcgacattgtagctgaattcgggccgggcatccttcgtgcggatggcgagatcgatcgcgggaaactgcgtgctatccgcttttcggacgaacaacaacgtaaggtgctgaattcgattgtaggtcctgcagtcctgaagaagatgctcgcggagtgggaagctcatatcgggtcaggcgccaagacggttgtgctggatatcccgctgctgttcgaatccggattgcaatcgtggatggacaaagttctcgtggtgtacgttgatgatgatacgcagttacgccgccttatggcacgtaacgggtttactgaagaagaagctctgatgcgcattcgttcacagtggcccagtgcggagaaagttaaacgtgcagacgctgtcatcgacaataatggcaatattgaagatacccgccgccagctgctggacattttacaccagtgggatctgctggacaaaggtggctccggccaccatcatcaccatcac

SEQ ID NO: 1904 - protein, 211 aa, synthetic construct
  REGION 1..211: note = Variant of 3'O-kinase
MAVTIGLTGGIAAGKSTVSAMMRELGLPVIDADEAARAVMKPGEEAYRDIVAEFGPGILRADGEIDRGKLRAIRFSDEQQRKVLNSIVGPAVLKKMLAEWEAHIGSGAKTVVLDIPLLFESGLQSWMDKVLVVYVDDDTQLRRLMARNGFTEEEALMRIRSQWPSAEKVKRADAVIDNNGNIEDTRRQLLDILHQWDLLDKGGSGHHHHHH

SEQ ID NO: 1905 - DNA, 633 bp, synthetic construct
  misc_feature 1..633: note = Variant of 3'O-kinase
  source 1..633: mol_type = other DNA
atggcggttaccattggtttaacaggagggatcgcagcgggcaaatcgactgtgagtcatatgatgcgtgaactgggtctgccggtcatcgatgctgacgaggcagcacgcgccgttatgaagccaggcgaagaagcgtatcgcgacattgtagctgaattcgggccgggcatccttcgtgcggatggcgagatcgatcgcgggaaactgcgtgctatccgcttttcggacgaacaacaacgtaaggtgctgaattcgattgtaggtcctgcagtcctgaagaagatgctcgcggagtgggaagctcatatcgggtcaggcgccaagacggttgtgctggatatcccgctgctgttcgaatccggattgcaatcgtggatggacaaagttctcgtggtgtacgttgatgatgatgttcagttacgccgccttatggcacgtaacgggtttactgaagaagaagctctgatgcgcattcgttcacagtggcccagtgcggagaaagttaaacgtgcagacgctgtcatcgacaataatggcaatattgaagatacccgccgccagctgctggacattttacaccagtgggatctgctggacaaaggtggctccggccaccatcatcaccatcac

SEQ ID NO: 1906 - protein, 211 aa, synthetic construct
  REGION 1..211: note = Variant of 3'O-kinase
MAVTIGLTGGIAAGKSTVSHMMRELGLPVIDADEAARAVMKPGEEAYRDIVAEFGPGILRADGEIDRGKLRAIRFSDEQQRKVLNSIVGPAVLKKMLAEWEAHIGSGAKTVVLDIPLLFESGLQSWMDKVLVVYVDDDVQLRRLMARNGFTEEEALMRIRSQWPSAEKVKRADAVIDNNGNIEDTRRQLLDILHQWDLLDKGGSGHHHHHH

SEQ ID NO: 1907 - DNA, 633 bp, synthetic construct
  misc_feature 1..633: note = Variant of 3'O-kinase
  source 1..633: mol_type = other DNA
atggcggttaccattggtttaacaggagggatcgcagcgggcaaatcgactgtgagtgccatgatgcgtgaactgggtctgccggtcatcgatgctgacgaggcagcacgcgccgttatgaagccaggcgaagaagcgtatcgcgacattgtagctgaattcgggccgggcatccttcgtgcggatggcgagatcgatcgcgggaaactgcgtgctatccgcttttcggacgaacaacaacgtaaggtgctgacttcgattgtaggtcctgcagtcctgaagaagatgctcgcggagtgggaagctcatatcgggtcaggcgccaagacggttgtgctggatatcccgctgctgttcgaatccggattgcaatcgtggatggacaaagttctcgtggtgtacgttgatgatgatgttcagttacgccgccttatggcacgtaacgggtttactgaagaagaagctctgatgcgcattcgttcacagtggcccagtgcggagaaagttaaacgtgcagacgctgtcatcgacaataatggcaatattgaagatacccgccgccagctgctggacattttacaccagtgggatctgctggacaaaggtggctccggccaccatcatcaccatcac

SEQ ID NO: 1908 - protein, 211 aa, synthetic construct
  REGION 1..211: note = Variant of 3'O-kinase
MAVTIGLTGGIAAGKSTVSAMMRELGLPVIDADEAARAVMKPGEEAYRDIVAEFGPGILRADGEIDRGKLRAIRFSDEQQRKVLTSIVGPAVLKKMLAEWEAHIGSGAKTVVLDIPLLFESGLQSWMDKVLVVYVDDDVQLRRLMARNGFTEEEALMRIRSQWPSAEKVKRADAVIDNNGNIEDTRRQLLDILHQWDLLDKGGSGHHHHHH

SEQ ID NO: 1909 - DNA, 633 bp, synthetic construct
  misc_feature 1..633: note = Variant of 3'O-kinase
  source 1..633: mol_type = other DNA
atggcggttaccattggtttaacaggagggatcgcagcgggcaaatcgactgtgagtgccatgatgcgtgaactgggtctgccggtcatcgatgctgacgaggcagcacgcgccgttatgaagccaggcgaagaagcgtatcgcgacattgtagctgaattcgggccgggcatccttcgtgcggatggcgagatcgatcgcgggaaactgcgtgctatccgcttttcggacgaacaacaacgtaaggtgctgaattcgattttgggtcctgcagtcctgaagaagatgctcgcggagtgggaagctcatatcgggtcaggcgccaagacggttgtgctggatatcccgctgctgttcgaatccggattgcaatcgtggatggacaaagttctcgtggtgtacgttgatgatgatgttcagttacgccgccttatggcacgtaacgggtttactgaagaagaagctctgatgcgcattcgttcacagtggcccagtgcggagaaagttaaacgtgcagacgctgtcatcgacaataatggcaatattgaagatacccgccgccagctgctggacattttacaccagtgggatctgctggacaaaggtggctccggccaccatcatcaccatcac

SEQ ID NO: 1910 - protein, 211 aa, synthetic construct
  REGION 1..211: note = Variant of 3'O-kinase
MAVTIGLTGGIAAGKSTVSAMMRELGLPVIDADEAARAVMKPGEEAYRDIVAEFGPGILRADGEIDRGKLRAIRFSDEQQRKVLNSILGPAVLKKMLAEWEAHIGSGAKTVVLDIPLLFESGLQSWMDKVLVVYVDDDVQLRRLMARNGFTEEEALMRIRSQWPSAEKVKRADAVIDNNGNIEDTRRQLLDILHQWDLLDKGGSGHHHHHH

SEQ ID NO: 1911 - DNA, 633 bp, synthetic construct
  misc_feature 1..633: note = Variant of 3'O-kinase
  source 1..633: mol_type = other DNA
atggcggttaccattggtttaacaggagggatcgcagcgggcaaatcgactgtgagtgccatgatgcgtgaactgggtctgccggtcatcgatgctgacgaggcagcacgcgccgttatgaagccaggcgaagaagcgtatcgcgacattgtagctgaattcgggccgggcatccttcgtgcggatggcgagatcgatcgcgggaaactgcgtgctatccgcttttcggacgaacaacaacgtaaggtgctgaattcgattgtacttcctgcagtcctgaagaagatgctcgcggagtgggaagctcatatcgggtcaggcgccaagacggttgtgctggatatcccgctgctgttcgaatccggattgcaatcgtggatggacaaagttctcgtggtgtacgttgatgatgatgttcagttacgccgccttatggcacgtaacgggtttactgaagaagaagctctgatgcgcattcgttcacagtggcccagtgcggagaaagttaaacgtgcagacgctgtcatcgacaataatggcaatattgaagatacccgccgccagctgctggacattttacaccagtgggatctgctggacaaaggtggctccggccaccatcatcaccatcac

SEQ ID NO: 1912 - protein, 211 aa, synthetic construct
  REGION 1..211: note = Variant of 3'O-kinase
MAVTIGLTGGIAAGKSTVSAMMRELGLPVIDADEAARAVMKPGEEAYRDIVAEFGPGILRADGEIDRGKLRAIRFSDEQQRKVLNSIVLPAVLKKMLAEWEAHIGSGAKTVVLDIPLLFESGLQSWMDKVLVVYVDDDVQLRRLMARNGFTEEEALMRIRSQWPSAEKVKRADAVIDNNGNIEDTRRQLLDILHQWDLLDKGGSGHHHHHH

SEQ ID NO: 1913 - DNA, 633 bp, synthetic construct
  misc_feature 1..633: note = Variant of 3'O-kinase
  source 1..633: mol_type = other DNA
atggcggttaccattggtttaacaggagggatcgcagcgggcaaatcgactgtgagtgccatgatgcgtgaactgggtctgccggtcatcgatgctgacgaggcagcacgcgccgttatgaagccaggcgaagaagcgtatcgcgacattgtagctgaattcgggccgggcatccttcgtgcggatggcgagatcgatcgcgggaaactgcgtgctatccgcttttcggacgaacaacaacgtaaggtgctgaattcgattgtaggtcctgcagtcctgaagaagatgctcgcggagtgggaagctcatatcgggtcaggcgccaagacggttgtgctggatatcccgctgctgttcgaatccggattgcaatcgtggatggacaaagttctcgtggtgtgggttgatgatgatgttcagttacgccgccttatggcacgtaacgggtttactgaagaagaagctctgatgcgcattcgttcacagtggcccagtgcggagaaagttaaacgtgcagacgctgtcatcgacaataatggcaatattgaagatacccgccgccagctgctggacattttacaccagtgggatctgctggacaaaggtggctccggccaccatcatcaccatcac

SEQ ID NO: 1914 - protein, 211 aa, synthetic construct
  REGION 1..211: note = Variant of 3'O-kinase
MAVTIGLTGGIAAGKSTVSAMMRELGLPVIDADEAARAVMKPGEEAYRDIVAEFGPGILRADGEIDRGKLRAIRFSDEQQRKVLNSIVGPAVLKKMLAEWEAHIGSGAKTVVLDIPLLFESGLQSWMDKVLVVWVDDDVQLRRLMARNGFTEEEALMRIRSQWPSAEKVKRADAVIDNNGNIEDTRRQLLDILHQWDLLDKGGSGHHHHHH

SEQ ID NO: 1915 - DNA, 633 bp, synthetic construct
  misc_feature 1..633: note = Variant of 3'O-kinase
  source 1..633: mol_type = other DNA
atggcggttaccattggtttaacaggagggatcgcagcgggcaaatcgactgtgagtgccatgatgcgtgaactgggtctgccggtcatcgatgctgacgagcttgcacgcgccgttatgaagccaggcgaagaagcgtatcgcgacattgtagctgaattcgggccgggcatccttcgtgcggatggcgagatcgatcgcgggaaactgcgtgctatccgcttttcggacgaacaacaacgtaaggtgctgaattcgattgtaggtcctgcagtcctgaagaagatgctcgcggagtgggaagctcatatcgggtcaggcgccaagacggttgtgctggatatcccgctgctgttcgaatccggattgcaatcgtggatggacaaagttctcgtggtgtacgttgatgatgatgttcagttacgccgccttatggcacgtaacgggtttactgaagaagaagctctgatgcgcattcgttcacagtggcccagtgcggagaaagttaaacgtgcagacgctgtcatcgacaataatggcaatattgaagatacccgccgccagctgctggacattttacaccagtgggatctgctggacaaaggtggctccggccaccatcatcaccatcac

SEQ ID NO: 1916 - protein, 211 aa, synthetic construct
  REGION 1..211: note = Variant of 3'O-kinase
MAVTIGLTGGIAAGKSTVSAMMRELGLPVIDADELARAVMKPGEEAYRDIVAEFGPGILRADGEIDRGKLRAIRFSDEQQRKVLNSIVGPAVLKKMLAEWEAHIGSGAKTVVLDIPLLFESGLQSWMDKVLVVYVDDDVQLRRLMARNGFTEEEALMRIRSQWPSAEKVKRADAVIDNNGNIEDTRRQLLDILHQWDLLDKGGSGHHHHHH

SEQ ID NO: 1917 - DNA, 633 bp, synthetic construct
  misc_feature 1..633: note = Variant of 3'O-kinase
  source 1..633: mol_type = other DNA
atggcggttaccattggtttaacaggagggatcgcagcgggcaaatcgactgtgagtgccatgatgcgtgaactgggtctgccggtcatcgatgctgacgaggcagcacgcgccgttatgaagccaggcgaagaagcgtatcgcgacattgtagctgaattcgggccgggcatccttcgtgcggatggcgagatcgatcgcgggaaactgcgtgctatccgcttttcggacgaacaacaacgtaaggtgctgaattcgattgtaggtcctgcagtcctgaagaagatgctcgcggagtgggaagctcatatcgggtcaggcgccaagacggttgtgctggatatcccgctgctgttcgaatccggattgcaatcgtggatggacaaagttctcgtggtgtacgttgatgatgatgttcagttacgccgccttatgtcgcgtaacgggtttactgaagaagaagctctgatgcgcattcgttcacagtggcccagtgcggagaaagttaaacgtgcagacgctgtcatcgacaataatggcaatattgaagatacccgccgccagctgctggacattttacaccagtgggatctgctggacaaaggtggctccggccaccatcatcaccatcac

SEQ ID NO: 1918 - protein, 211 aa, synthetic construct
  REGION 1..211: note = Variant of 3'O-kinase
MAVTIGLTGGIAAGKSTVSAMMRELGLPVIDADEAARAVMKPGEEAYRDIVAEFGPGILRADGEIDRGKLRAIRFSDEQQRKVLNSIVGPAVLKKMLAEWEAHIGSGAKTVVLDIPLLFESGLQSWMDKVLVVYVDDDVQLRRLMSRNGFTEEEALMRIRSQWPSAEKVKRADAVIDNNGNIEDTRRQLLDILHQWDLLDKGGSGHHHHHH

SEQ ID NO: 1919 - DNA, 633 bp, synthetic construct
  misc_feature 1..633: note = Variant of 3'O-kinase
  source 1..633: mol_type = other DNA
atggcggttaccattggtttaacaggagggatcgcagcgggcaaatcgactgtgagtgccatgatgcgtgaactgggtctgccggtcatcgatgctgacgaggcagcacgcgccgttatgaagccaggcgaagaagcgtatcgcgacattgtagctgaattcgggccgggcatccttcgtgcggatggcgagatcgatcgcgggaaactgcgtgctatccgcttttcggacgaacaacaacgtaaggtgctgctttcgattgtaggtcctgcagtcctgaagaagatgctcgcggagtgggaagctcatatcgggtcaggcgccaagacggttgtgctggatatcccgctgctgttcgaatccggattgcaatcgtggatggacaaagttctcgtggtgtacgttgatgatgatgttcagttacgccgccttatggcacgtaacgggtttactgaagaagaagctctgatgcgcattcgttcacagtggcccagtgcggagaaagttaaacgtgcagacgctgtcatcgacaataatggcaatattgaagatacccgccgccagctgctggacattttacaccagtgggatctgctggacaaaggtggctccggccaccatcatcaccatcac

SEQ ID NO: 1920 - protein, 211 aa, synthetic construct
  REGION 1..211: note = Variant of 3'O-kinase
MAVTIGLTGGIAAGKSTVSAMMRELGLPVIDADEAARAVMKPGEEAYRDIVAEFGPGILRADGEIDRGKLRAIRFSDEQQRKVLLSIVGPAVLKKMLAEWEAHIGSGAKTVVLDIPLLFESGLQSWMDKVLVVYVDDDVQLRRLMARNGFTEEEALMRIRSQWPSAEKVKRADAVIDNNGNIEDTRRQLLDILHQWDLLDKGGSGHHHHHH

SEQ ID NO: 1921 - DNA, 633 bp, synthetic construct
  misc_feature 1..633: note = Variant of 3'O-kinase
  source 1..633: mol_type = other DNA
atggcggttaccattggtttaacaggagggatcgcagcgggcaaatcgactgtgagtgccatgatgcgtgaactgggtctgccggtcatcgatgctgacgaggcagcacgcgccgttatgaagccaggcgaagaagcgtatcgcgacattgtagctgaattcgggccgggcatccttcgtgcggatggcgagatcgatcgcgggaaactgcgtgctatccgcttttcggacgaacaacaacgtaaggtgctgaattcgattgtaggtcctgcagtcctgaagaagatgctcgcggagtgggaagctcatatcgggtcaggcgccaagacggttgtgctggatatcccgctgctgttcgaatccggattgcaatcgtggatggacaaagttctcgtggtgtacgttgatgatgatgttcagttacgccgccttatggcacgtaacgggtttactgaagaagaagctctgatgcgcattcgtctgcagtggcccagtgcggagaaagttaaacgtgcagacgctgtcatcgacaataatggcaatattgaagatacccgccgccagctgctggacattttacaccagtgggatctgctggacaaaggtggctccggccaccatcatcaccatcac

SEQ ID NO: 1922 - protein, 211 aa, synthetic construct
  REGION 1..211: note = Variant of 3'O-kinase
MAVTIGLTGGIAAGKSTVSAMMRELGLPVIDADEAARAVMKPGEEAYRDIVAEFGPGILRADGEIDRGKLRAIRFSDEQQRKVLNSIVGPAVLKKMLAEWEAHIGSGAKTVVLDIPLLFESGLQSWMDKVLVVYVDDDVQLRRLMARNGFTEEEALMRIRLQWPSAEKVKRADAVIDNNGNIEDTRRQLLDILHQWDLLDKGGSGHHHHHH

SEQ ID NO: 1923 - DNA, 633 bp, synthetic construct
  misc_feature 1..633: note = Variant of 3'O-kinase
  source 1..633: mol_type = other DNA
atggcggttaccattggtttaacaggagggatcgcagcgggcaaatcgactgtgagtgccatgatgcgtgaactgggtctgccggtcatcgatgctgacgaggcagcacgcgccgttatgaagccaggcgaagaagcgtatcgcgacattgtagctgaattcgggccgggcatccttcgtgcggatggcgagatcgatcgcgggaaactgcgtgctatccgcttttcggacgaacaacaacgtaaggtgctgaattcgattgtaggtcctgcagtcctgaagaagatgctcgcggagtgggaagctcatatcgggtcaggcgccaagacggttgtgctggatatcccgctgctgttcgaatccggattgcaatcgtgggtggacaaagttctcgtggtgtacgttgatgatgatgttcagttacgccgccttatggcacgtaacgggtttactgaagaagaagctctgatgcgcattcgttcacagtggcccagtgcggagaaagttaaacgtgcagacgctgtcatcgacaataatggcaatattgaagatacccgccgccagctgctggacattttacaccagtgggatctgctggacaaaggtggctccggccaccatcatcaccatcac

SEQ ID NO: 1924 - protein, 211 aa, synthetic construct
  REGION 1..211: note = Variant of 3'O-kinase
MAVTIGLTGGIAAGKSTVSAMMRELGLPVIDADEAARAVMKPGEEAYRDIVAEFGPGILRADGEIDRGKLRAIRFSDEQQRKVLNSIVGPAVLKKMLAEWEAHIGSGAKTVVLDIPLLFESGLQSWVDKVLVVYVDDDVQLRRLMARNGFTEEEALMRIRSQWPSAEKVKRADAVIDNNGNIEDTRRQLLDILHQWDLLDKGGSGHHHHHH

SEQ ID NO: 1925 - DNA, 633 bp, synthetic construct
  misc_feature 1..633: note = Variant of 3'O-kinase
  source 1..633: mol_type = other DNA
atggcggttaccattggtttaacaggagggatcgcagcgggcaaatcgactgtgagtgccatgatgcgtgaactgggtctgccggtcatcgatgctgacgaggcagcacgcgccgttatgaagccaggcgaagaagcgtatcgcgacattgtagctgaattcgggccgggcatccttcgtgcggatggcgagatcgatcgcgggaaactgcgtgctatccgcttttcggacgaacaacaacgtaaggtgctgaattcgattgtaggtcctgcagtcctgaagaagatgctcgcggagtgggaagctcatatcgggtcaggcgccaagacggttgtgctggatatcccgctgctgttcgaagggggattgcaatcgtggatggacaaagttctcgtggtgtacgttgatgatgatgttcagttacgccgccttatggcacgtaacgggtttactgaagaagaagctctgatgcgcattcgttcacagtggcccagtgcggagaaagttaaacgtgcagacgctgtcatcgacaataatggcaatattgaagatacccgccgccagctgctggacattttacaccagtgggatctgctggacaaaggtggctccggccaccatcatcaccatcac

SEQ ID NO: 1926 - protein, 211 aa, synthetic construct
  REGION 1..211: note = Variant of 3'O-kinase
MAVTIGLTGGIAAGKSTVSAMMRELGLPVIDADEAARAVMKPGEEAYRDIVAEFGPGILRADGEIDRGKLRAIRFSDEQQRKVLNSIVGPAVLKKMLAEWEAHIGSGAKTVVLDIPLLFEGGLQSWMDKVLVVYVDDDVQLRRLMARNGFTEEEALMRIRSQWPSAEKVKRADAVIDNNGNIEDTRRQLLDILHQWDLLDKGGSGHHHHHH

SEQ ID NO: 1927 - DNA, 633 bp, synthetic construct
  misc_feature 1..633: note = Variant of 3'O-kinase
  source 1..633: mol_type = other DNA
atggcggttaccattggtttaacaggagggatcgcagcgggcaaatcgactgtgagtgggatgatgcgtgaactgggtctgccggtcatcgatgctgacgaggcagcacgcgccgttatgaagccaggcgaagaagcgtatcgcgacattgtagctgaattcgggccgggcatccttcgtgcggatggcgagatcgatcgcgggaaactgcgtgctatccgcttttcggacgaacaacaacgtaaggtgctgaattcgattgtaggtcctgcagtcctgaagaagatgctcgcggagtgggaagctcatatcgggtcaggcgccaagacggttgtgctggatatcccgctgctgttcgaatccggattgcaatcgtggatggacaaagttctcgtggtgtacgttgatgatgatgttcagttacgccgccttatggcacgtaacgggtttactgaagaagaagctctgatgcgcattcgttcacagtggcccagtgcggagaaagttaaacgtgcagacgctgtcatcgacaataatggcaatattgaagatacccgccgccagctgctggacattttacaccagtgggatctgctggacaaaggtggctccggccaccatcatcaccatcac

SEQ ID NO: 1928 - protein, 211 aa, synthetic construct
  REGION 1..211: note = Variant of 3'O-kinase
MAVTIGLTGGIAAGKSTVSGMMRELGLPVIDADEAARAVMKPGEEAYRDIVAEFGPGILRADGEIDRGKLRAIRFSDEQQRKVLNSIVGPAVLKKMLAEWEAHIGSGAKTVVLDIPLLFESGLQSWMDKVLVVYVDDDVQLRRLMARNGFTEEEALMRIRSQWPSAEKVKRADAVIDNNGNIEDTRRQLLDILHQWDLLDKGGSGHHHHHH

SEQ ID NO: 1929 - DNA, 633 bp, synthetic construct
  misc_feature 1..633: note = Variant of 3'O-kinase
  source 1..633: mol_type = other DNA
atggcggttaccattggtttaacaggagggatcgcagcgggcaaatcgactgtgagtgccatgcttcgtgaactgggtctgccggtcatcgatgctgacgaggcagcacgcgccgttatgaagccaggcgaagaagcgtatcgcgacattgtagctgaattcgggccgggcatccttcgtgcggatggcgagatcgatcgcgggaaactgcgtgctatccgcttttcggacgaacaacaacgtaaggtgctgaattcgattgtaggtcctgcagtcctgaagaagatgctcgcggagtgggaagctcatatcgggtcaggcgccaagacggttgtgctggatatcccgctgctgttcgaatccggattgcaatcgtggatggacaaagttctcgtggtgtacgttgatgatgatgttcagttacgccgccttatggcacgtaacgggtttactgaagaagaagctctgatgcgcattcgttcacagtggcccagtgcggagaaagttaaacgtgcagacgctgtcatcgacaataatggcaatattgaagatacccgccgccagctgctggacattttacaccagtgggatctgctggacaaaggtggctccggccaccatcatcaccatcac

SEQ ID NO: 1930 - protein, 211 aa, synthetic construct
  REGION 1..211: note = Variant of 3'O-kinase
MAVTIGLTGGIAAGKSTVSAMLRELGLPVIDADEAARAVMKPGEEAYRDIVAEFGPGILRADGEIDRGKLRAIRFSDEQQRKVLNSIVGPAVLKKMLAEWEAHIGSGAKTVVLDIPLLFESGLQSWMDKVLVVYVDDDVQLRRLMARNGFTEEEALMRIRSQWPSAEKVKRADAVIDNNGNIEDTRRQLLDILHQWDLLDKGGSGHHHHHH

SEQ ID NO: 1931 - DNA, 633 bp, synthetic construct
  misc_feature 1..633: note = Variant of 3'O-kinase
  source 1..633: mol_type = other DNA
atggcggttaccattggtttaacaggagggatcgcagcgggcaaatcgactgtgagtgccatgatgcgtgaactgggtctgccggtcatcgatgctgacgaggcagcacgcgccgttatgaagccaggcgaagaagcgtatcgcgacattgtagctgaattcgggccgggcatccttcgtgcggatggcgagatcgatcgcgggaaactgcgtgctatccgcttttcggacgaacaacaacgtaaggtgctgaattcgattgtaggtcctgcagtcctgaagaagatgctcgcggagtgggaagctcatatcgggtcaggcgccaagacggttgtgctggatatcccgctgctgttcgaatccggattgcaatcgtggatggacaaagttctcgtggtgtacgttgatgatgatgttcagttacgccgccttatggcacgtaacgggtttactgaagaagaagctctgatgcgcattcattcacagtggcccagtgcggagaaagttaaacgtgcagacgctgtcatcgacaataatggcaatattgaagatacccgccgccagctgctggacattttacaccagtgggatctgctggacaaaggtggctccggccaccatcatcaccatcac

SEQ ID NO: 1932 - protein, 211 aa, synthetic construct
  REGION 1..211: note = Variant of 3'O-kinase
MAVTIGLTGGIAAGKSTVSAMMRELGLPVIDADEAARAVMKPGEEAYRDIVAEFGPGILRADGEIDRGKLRAIRFSDEQQRKVLNSIVGPAVLKKMLAEWEAHIGSGAKTVVLDIPLLFESGLQSWMDKVLVVYVDDDVQLRRLMARNGFTEEEALMRIHSQWPSAEKVKRADAVIDNNGNIEDTRRQLLDILHQWDLLDKGGSGHHHHHH

SEQ ID NO: 1933 - DNA, 633 bp, synthetic construct
  misc_feature 1..633: note = Variant of 3'O-kinase
  source 1..633: mol_type = other DNA
atggcggttaccattggtttaacaggagggatcgcagcgggcaaatcgactgtgagtgccatgatgcgtgaactgggtctgccggtcatcgatgctgacgaggcagcacgcgccgttatgaagccaggcgaagaagcgtatcgcgacattgtagctgaattcgggccgggcatccttcgtgcggatggcgagatcgatcgcgggaaactgcgtgctatccgcttttcggacgaacaacaacgtaaggtgctgaattcgattgtaggtcctgcagtcctgaagaagatgctcgcggagtgggaagctcatatcgggtcaggcgccaagacggttgtgctggatatcccgctgctgttcgaatccggattgcaatcgtggatggacaaagttctcgtggtgtacgttgatgatgatgttcagttacgccgccttatggcacgtaacgggtttactgaagaagaagctctgatgcgcattcgttcacagtggcccagtgcggagaaagttaaacgtgcagacgctgtcttggacaataatggcaatattgaagatacccgccgccagctgctggacattttacaccagtgggatctgctggacaaaggtggctccggccaccatcatcaccatcac

SEQ ID NO: 1934 - protein, 211 aa, synthetic construct
  REGION 1..211: note = Variant of 3'O-kinase
MAVTIGLTGGIAAGKSTVSAMMRELGLPVIDADEAARAVMKPGEEAYRDIVAEFGPGILRADGEIDRGKLRAIRFSDEQQRKVLNSIVGPAVLKKMLAEWEAHIGSGAKTVVLDIPLLFESGLQSWMDKVLVVYVDDDVQLRRLMARNGFTEEEALMRIRSQWPSAEKVKRADAVLDNNGNIEDTRRQLLDILHQWDLLDKGGSGHHHHHH

SEQ ID NO: 1935 - DNA, 633 bp, synthetic construct
  misc_feature 1..633: note = Variant of 3'O-kinase
  source 1..633: mol_type = other DNA
atggcggttaccattggtttaacaggagggatcgcagcgggcaaatcgactgtgagtgccatgatgcgtgaactgggtctgccggtcatcgatgctgacgaggcagcacgcgccgttatgaagccaggcgaagaagcgtatcgcgacattgtagctgaattcgggccgggcatccttcgtgcggatggcgagatcgatcgcgggaaactgcgtgctatccgcttttcggacgaacaacaacgtaaggtgctgaattcgattgtaggtcctgcagtcctgaagaagatgctcgcggagtgggaagctcatatcgggtcaggcgccaagacggttgtgctggatatcccgctgctgttcgaatccggattgcaatcgtggatggacaaagttctcgtggtgtacgttgatgatgatgttcagttacgccgccttatggatcgtaacgggtttactgaagaagaagctctgatgcgcattcgttcacagtggcccagtgcggagaaagttaaacgtgcagacgctgtcatcgacaataatggcaatattgaagatacccgccgccagctgctggacattttacaccagtgggatctgctggacaaaggtggctccggccaccatcatcaccatcac

SEQ ID NO: 1936 - protein, 211 aa, synthetic construct
  REGION 1..211: note = Variant of 3'O-kinase
MAVTIGLTGGIAAGKSTVSAMMRELGLPVIDADEAARAVMKPGEEAYRDIVAEFGPGILRADGEIDRGKLRAIRFSDEQQRKVLNSIVGPAVLKKMLAEWEAHIGSGAKTVVLDIPLLFESGLQSWMDKVLVVYVDDDVQLRRLMDRNGFTEEEALMRIRSQWPSAEKVKRADAVIDNNGNIEDTRRQLLDILHQWDLLDKGGSGHHHHHH

SEQ ID NO: 1937 - DNA, 633 bp, synthetic construct
  misc_feature 1..633: note = Variant of 3'O-kinase
  source 1..633: mol_type = other DNA
atggcggttaccattggtttaacaggagggatcgcagcgggcaaatcgactgtgagtgccatgatgcgtgaactgggtctgccggtcatcgatgctgacgaggcagcacgcgccgttatgaagccaggcgaagaagcgtatcgcgacattgtagctgaattcgggccgggcatccttcgtgcggatggcgagatcgatcgcgggaaactgcgtgctatccgcttttcggacgaacaacaacgtaaggtgctgaattcgattgtaggtcctgcagtcctgaagaagatgctcgcggagtgggaagctcatatcgggtcaggcgccaagacggttgtgctggatatcccgctgctgttcgaatccggattgcaatcgtggatggacaaagttctcgtggtgtacgttgatgatgatgttcagttagggcgccttatggcacgtaacgggtttactgaagaagaagctctgatgcgcattcgttcacagtggcccagtgcggagaaagttaaacgtgcagacgctgtcatcgacaataatggcaatattgaagatacccgccgccagctgctggacattttacaccagtgggatctgctggacaaaggtggctccggccaccatcatcaccatcac

SEQ ID NO: 1938 - protein, 211 aa, synthetic construct
  REGION 1..211: note = Variant of 3'O-kinase
MAVTIGLTGGIAAGKSTVSAMMRELGLPVIDADEAARAVMKPGEEAYRDIVAEFGPGILRADGEIDRGKLRAIRFSDEQQRKVLNSIVGPAVLKKMLAEWEAHIGSGAKTVVLDIPLLFESGLQSWMDKVLVVYVDDDVQLGRLMARNGFTEEEALMRIRSQWPSAEKVKRADAVIDNNGNIEDTRRQLLDILHQWDLLDKGGSGHHHHHH

SEQ ID NO: 1939 - DNA, 633 bp, synthetic construct
  misc_feature 1..633: note = Variant of 3'O-kinase
  source 1..633: mol_type = other DNA
atggcggttaccattggtttaacaggagggatcgcagcgggcaaatcgactgtgagtgccatgatgcgtgaactgggtctgccggtcatcgatgctgacgaggcagcacgcgccgttatgaagccaggcgaagaagcgtatcgcgacattgtagctgaattcgggccgggcatccttcgtgcggatggcgagatcgatcgcgggaaactgcgtgctatccgcttttcggacgaacaacaacgtaaggtgctgaattcgattgtaggtcctgcagtcctgaagaagatgctcgcggagtgggaagctcatatcgggtcaggcgccaagacggttgtgctggatatcccgctgctgttcgaatccggattgcaatcgtggatggacaaagttctcgtggtgtacgtttcggatgatgttcagttacgccgccttatggcacgtaacgggtttactgaagaagaagctctgatgcgcattcgttcacagtggcccagtgcggagaaagttaaacgtgcagacgctgtcatcgacaataatggcaatattgaagatacccgccgccagctgctggacattttacaccagtgggatctgctggacaaaggtggctccggccaccatcatcaccatcac

SEQ ID NO: 1940 - protein, 211 aa, synthetic construct
  REGION 1..211: note = Variant of 3'O-kinase
MAVTIGLTGGIAAGKSTVSAMMRELGLPVIDADEAARAVMKPGEEAYRDIVAEFGPGILRADGEIDRGKLRAIRFSDEQQRKVLNSIVGPAVLKKMLAEWEAHIGSGAKTVVLDIPLLFESGLQSWMDKVLVVYVSDDVQLRRLMARNGFTEEEALMRIRSQWPSAEKVKRADAVIDNNGNIEDTRRQLLDILHQWDLLDKGGSGHHHHHH

SEQ ID NO: 1941 - DNA, 633 bp, synthetic construct
  misc_feature 1..633: note = Variant of 3'O-kinase
  source 1..633: mol_type = other DNA
atggcggttaccattggtttaacaggagggatcgcagcgggcaaatcgactgtgagtgccatgatgcgtgaactgggtctgccggtcatcgatgctgacgaggcagcacgcgccgttatgaagccaggcgaagaagcgtatcgcgacattgtagctgaattcgggccgggcatccttcgtgcggatggcgagatcgatcgcgggaaactgcgtgctatccgcttttcggacgaacaacaaaataaggtgctgaattcgattgtaggtcctgcagtcctgaagaagatgctcgcggagtgggaagctcatatcgggtcaggcgccaagacggttgtgctggatatcccgctgctgttcgaatccggattgcaatcgtggatggacaaagttctcgtggtgtacgttgatgatgatgttcagttacgccgccttatggcacgtaacgggtttactgaagaagaagctctgatgcgcattcgttcacagtggcccagtgcggagaaagttaaacgtgcagacgctgtcatcgacaataatggcaatattgaagatacccgccgccagctgctggacattttacaccagtgggatctgctggacaaaggtggctccggccaccatcatcaccatcac

SEQ ID NO: 1942 - protein, 211 aa, synthetic construct
  REGION 1..211: note = Variant of 3'O-kinase
MAVTIGLTGGIAAGKSTVSAMMRELGLPVIDADEAARAVMKPGEEAYRDIVAEFGPGILRADGEIDRGKLRAIRFSDEQQNKVLNSIVGPAVLKKMLAEWEAHIGSGAKTVVLDIPLLFESGLQSWMDKVLVVYVDDDVQLRRLMARNGFTEEEALMRIRSQWPSAEKVKRADAVIDNNGNIEDTRRQLLDILHQWDLLDKGGSGHHHHHH

SEQ ID NO: 1943 - DNA, 633 bp, synthetic construct
  misc_feature 1..633: note = Variant of 3'O-kinase
  source 1..633: mol_type = other DNA
atggcggttaccattggtttaacaggagggatcgcagcgggcaaatcgactgtgagtgccatgatgcgtgaactgggtctgccggtcatcgatgctgacgaggcagcacgcgccgttatgaagccaggcgaagaagcgtatcgcgacattgtagctgaattcgggccgggcatccttcgtgcggatggcgagatcgatcgcgggaaactgcgtgctatccgcttttcggacgaacaacaacgtaaggtgctgaattcgattgtaggtcctgcagtcctgaagaagatgctcgcggagtgggaagctcatatcgggtcaggcgccaagacggttgtgctggatatcccgctgctgttcgaatccggattgcaatcgtggatggacaaagttctcgtggtgtacgttgatgatgatgttcaggtgcgccgccttatggcacgtaacgggtttactgaagaagaagctctgatgcgcattcgttcacagtggcccagtgcggagaaagttaaacgtgcagacgctgtcatcgacaataatggcaatattgaagatacccgccgccagctgctggacattttacaccagtgggatctgctggacaaaggtggctccggccaccatcatcaccatcac

SEQ ID NO: 1944 - protein, 211 aa, synthetic construct
  REGION 1..211: note = Variant of 3'O-kinase
MAVTIGLTGGIAAGKSTVSAMMRELGLPVIDADEAARAVMKPGEEAYRDIVAEFGPGILRADGEIDRGKLRAIRFSDEQQRKVLNSIVGPAVLKKMLAEWEAHIGSGAKTVVLDIPLLFESGLQSWMDKVLVVYVDDDVQVRRLMARNGFTEEEALMRIRSQWPSAEKVKRADAVIDNNGNIEDTRRQLLDILHQWDLLDKGGSGHHHHHH

SEQ ID NO: 1945 - DNA, 633 bp, synthetic construct
  misc_feature 1..633: note = Variant of 3'O-kinase
  source 1..633: mol_type = other DNA
atggcggttaccattggtttaacaggagggatcgcagcgggcaaatcgactgtgagtgccatgatgcgtgaactgggtctgccggtcatcgatgctgacgaggcagcacgcgccgttatgaagccaggcgaagaagcgtatcgcgacattgtagctgaattcgggccgggcatccttcgtgcggatggcgagatcgatcgcagtaaactgcgtgctatccgcttttcggacgaacaacaacgtaaggtgctgaattcgattgtaggtcctgcagtcctgaagaagatgctcgcggagtgggaagctcatatcgggtcaggcgccaagacggttgtgctggatatcccgctgctgttcgaatccggattgcaatcgtggatggacaaagttctcgtggtgtacgttgatgatgatgttcagttacgccgccttatggcacgtaacgggtttactgaagaagaagctctgatgcgcattcgttcacagtggcccagtgcggagaaagttaaacgtgcagacgctgtcatcgacaataatggcaatattgaagatacccgccgccagctgctggacattttacaccagtgggatctgctggacaaaggtggctccggccaccatcatcaccatcac

SEQ ID NO: 1946 - protein, 211 aa, synthetic construct
  REGION 1..211: note = Variant of 3'O-kinase
MAVTIGLTGGIAAGKSTVSAMMRELGLPVIDADEAARAVMKPGEEAYRDIVAEFGPGILRADGEIDRSKLRAIRFSDEQQRKVLNSIVGPAVLKKMLAEWEAHIGSGAKTVVLDIPLLFESGLQSWMDKVLVVYVDDDVQLRRLMARNGFTEEEALMRIRSQWPSAEKVKRADAVIDNNGNIEDTRRQLLDILHQWDLLDKGGSGHHHHHH

SEQ ID NO: 1947 - DNA, 633 bp, synthetic construct
  misc_feature 1..633: note = Variant of 3'O-kinase
  source 1..633: mol_type = other DNA
atggcggttaccattggtttaacaggagggatcgcagcgggcaaatcgactgtgagtgccatgatgcgtgaactgggtctgccggtcatcgatgctgacgaggcagcacgcgccgttatgaagccaggcgaagaagcgtatcgcgacattgtagctgaattcgggccgggcatccttcgtgcggatggcgagatcgatcgcgggaaactgcgtgctatccgcttttcggacgaacaacaacgtaaggtgctgaattcgattgtaggtcctgcagtcctgaagaagatgctcgcggagtgggaagctcatatcgggtcaggcgccaagacggttgtgctggatatcccgctgctgttcgaaacgggattgcaatcgtggatggacaaagttctcgtggtgtacgttgatgatgatgttcagttacgccgccttatggcacgtaacgggtttactgaagaagaagctctgatgcgcattcgttcacagtggcccagtgcggagaaagttaaacgtgcagacgctgtcatcgacaataatggcaatattgaagatacccgccgccagctgctggacattttacaccagtgggatctgctggacaaaggtggctccggccaccatcatcaccatcac

SEQ ID NO: 1948 - protein, 211 aa, synthetic construct
  REGION 1..211: note = Variant of 3'O-kinase
MAVTIGLTGGIAAGKSTVSAMMRELGLPVIDADEAARAVMKPGEEAYRDIVAEFGPGILRADGEIDRGKLRAIRFSDEQQRKVLNSIVGPAVLKKMLAEWEAHIGSGAKTVVLDIPLLFETGLQSWMDKVLVVYVDDDVQLRRLMARNGFTEEEALMRIRSQWPSAEKVKRADAVIDNNGNIEDTRRQLLDILHQWDLLDKGGSGHHHHHH

SEQ ID NO: 1949 - DNA, 633 bp, synthetic construct
  misc_feature 1..633: note = Variant of 3'O-kinase
  source 1..633: mol_type = other DNA
atggcggttaccattggtttaacaggagggatcgcagcgggcaaatcgactgtgagtgccatgatgcgtgaactgggtctgccggtcatcgatgctgacgaggtggcacgcgccgttatgaagccaggcgaagaagcgtatcgcgacattgtagctgaattcgggccgggcatccttcgtgcggatggcgagatcgatcgcgggaaactgcgtgctatccgcttttcggacgaacaacaacgtaaggtgctgaattcgattgtaggtcctgcagtcctgaagaagatgctcgcggagtgggaagctcatatcgggtcaggcgccaagacggttgtgctggatatcccgctgctgttcgaatccggattgcaatcgtggatggacaaagttctcgtggtgtacgttgatgatgatgttcagttacgccgccttatggcacgtaacgggtttactgaagaagaagctctgatgcgcattcgttcacagtggcccagtgcggagaaagttaaacgtgcagacgctgtcatcgacaataatggcaatattgaagatacccgccgccagctgctggacattttacaccagtgggatctgctggacaaaggtggctccggccaccatcatcaccatcac

SEQ ID NO: 1950 - protein, 211 aa, synthetic construct
  REGION 1..211: note = Variant of 3'O-kinase
MAVTIGLTGGIAAGKSTVSAMMRELGLPVIDADEVARAVMKPGEEAYRDIVAEFGPGILRADGEIDRGKLRAIRFSDEQQRKVLNSIVGPAVLKKMLAEWEAHIGSGAKTVVLDIPLLFESGLQSWMDKVLVVYVDDDVQLRRLMARNGFTEEEALMRIRSQWPSAEKVKRADAVIDNNGNIEDTRRQLLDILHQWDLLDKGGSGHHHHHH

SEQ ID NO: 1951 - DNA, 633 bp, synthetic construct
  misc_feature 1..633: note = Variant of 3'O-kinase
  source 1..633: mol_type = other DNA
atggcggttaccattggtttaacaggagggatcgcagcgggcaaatcgactgtgagtgccatgatgcgtgaactgggtctgccggtcatcgatgctgacgaggcagcacgcgccgttatgaagccaggcgaagaagcgtatcgcgacattgtagctgaattcgggccgggcatccttcgtgcggatggcgagatcgatcgcgggaaactgcgtgctatccgcttttcggacgaacaacaacgtaaggtgctgaattcgattgtaggtcctgcagtcctgaagaagatgctcgcggagtgggaagctcatatcgggtcaggcgccaagacggttgtgctggatatcccgctgctgttcgaatccggattgcaatcgtggatggacaaagttctcgtggtgtacgttgatagtgatgttcagttacgccgccttatggcacgtaacgggtttactgaagaagaagctctgatgcgcattcgttcacagtggcccagtgcggagaaagttaaacgtgcagacgctgtcatcgacaataatggcaatattgaagatacccgccgccagctgctggacattttacaccagtgggatctgctggacaaaggtggctccggccaccatcatcaccatcac

SEQ ID NO: 1952 - protein, 211 aa, synthetic construct
  REGION 1..211: note = Variant of 3'O-kinase
MAVTIGLTGGIAAGKSTVSAMMRELGLPVIDADEAARAVMKPGEEAYRDIVAEFGPGILRADGEIDRGKLRAIRFSDEQQRKVLNSIVGPAVLKKMLAEWEAHIGSGAKTVVLDIPLLFESGLQSWMDKVLVVYVDSDVQLRRLMARNGFTEEEALMRIRSQWPSAEKVKRADAVIDNNGNIEDTRRQLLDILHQWDLLDKGGSGHHHHHH

SEQ ID NO: 1953 - DNA, 633 bp, synthetic construct
  misc_feature 1..633: note = Variant of 3'O-kinase
  source 1..633: mol_type = other DNA
atggcggttaccattggtttaacaggagggatcgcagcgggcaaatcgactgtgagtgccatgatgcgtgaactgggtctgccggtcatcgatgctgacgaggcagcacgcgccgttatgaagccaggcgaagaagcgtatcgcgacattgtagctgaattcgggccgggcatccttcgtgcggatggcgagatcgatcgcgggaaactggctgctatccgcttttcggacgaacaacaacgtaaggtgctgaattcgattgtaggtcctgcagtcctgaagaagatgctcgcggagtgggaagctcatatcgggtcaggcgccaagacggttgtgctggatatcccgctgctgttcgaatccggattgcaatcgtggatggacaaagttctcgtggtgtacgttgatgatgatgttcagttacgccgccttatggcacgtaacgggtttactgaagaagaagctctgatgcgcattcgttcacagtggcccagtgcggagaaagttaaacgtgcagacgctgtcatcgacaataatggcaatattgaagatacccgccgccagctgctggacattttacaccagtgggatctgctggacaaaggtggctccggccaccatcatcaccatcac

SEQ ID NO: 1954 - protein, 211 aa, synthetic construct
  REGION 1..211: note = Variant of 3'O-kinase
MAVTIGLTGGIAAGKSTVSAMMRELGLPVIDADEAARAVMKPGEEAYRDIVAEFGPGILRADGEIDRGKLAAIRFSDEQQRKVLNSIVGPAVLKKMLAEWEAHIGSGAKTVVLDIPLLFESGLQSWMDKVLVVYVDDDVQLRRLMARNGFTEEEALMRIRSQWPSAEKVKRADAVIDNNGNIEDTRRQLLDILHQWDLLDKGGSGHHHHHH

SEQ ID NO: 1955 - DNA, 633 bp, synthetic construct
  misc_feature 1..633: note = Variant of 3'O-kinase
  source 1..633: mol_type = other DNA
atggcggttaccattggtttaacaggagggatcgcagcgggcaaatcgactgtgagtgccatgatgcgtgaactgggtctgccggtcatcgatgctgacgaggcagcacgcgccgttatgaagccaggcgaagaagcgtatcgcgacattgtagctgaattcgggccgggcatccttcgtgcggatggcgagatcgatcgcgggaaactgcgtgctatccgcttttcggacgaacaacaacgtaaggtgctgaattcgattgtaggtcctgcagtcctgaagaagatgctcgcggagtgggaagctcatatcgggtcaggcgccaagacggttgtgctggatatcccgctgctgttcgaatccggattgcaatcgtggatggacaaagttctcgtggtgtacgttgatgatgatgttcagttacgccgccttatggcacgtaacgggcatactgaagaagaagctctgatgcgcattcgttcacagtggcccagtgcggagaaagttaaacgtgcagacgctgtcatcgacaataatggcaatattgaagatacccgccgccagctgctggacattttacaccagtgggatctgctggacaaaggtggctccggccaccatcatcaccatcac

SEQ ID NO: 1956 - protein, 211 aa, synthetic construct
  REGION 1..211: note = Variant of 3'O-kinase
MAVTIGLTGGIAAGKSTVSAMMRELGLPVIDADEAARAVMKPGEEAYRDIVAEFGPGILRADGEIDRGKLRAIRFSDEQQRKVLNSIVGPAVLKKMLAEWEAHIGSGAKTVVLDIPLLFESGLQSWMDKVLVVYVDDDVQLRRLMARNGHTEEEALMRIRSQWPSAEKVKRADAVIDNNGNIEDTRRQLLDILHQWDLLDKGGSGHHHHHH

SEQ ID NO: 1957 - DNA, 633 bp, synthetic construct
  misc_feature 1..633: note = Variant of 3'O-kinase
  source 1..633: mol_type = other DNA
atggcggttaccattggtttaacaggagggatcgcagcgggcaaatcgactgtgagtgccatgatgcgtgaactgggtctgccggtcatcgatgctgacgaggcagcacgcgccgttatgaagccaggcgaagaagcgtatcgcgacattgtagctgaattcgggccgggcatccttcgtgcggatggcgagatcgatcgcgggaaactgcgtgctatccgcttttcggacgaacaacaacgtaaggtgctgaattcgattgtaggtcctgcagtcctgaagaagatgctcgcggagtgggaagctcatatcgggtcaggcgccaagacggttgtgctggatatcccgctgctgttcgaatccggattgcaatcgtggatggacaaagttctcgtggtgtacgttgatgatgatgttcagttacgccgccttatggcacgtaacgggtttgcggaagaagaagctctgatgcgcattcgttcacagtggcccagtgcggagaaagttaaacgtgcagacgctgtcatcgacaataatggcaatattgaagatacccgccgccagctgctggacattttacaccagtgggatctgctggacaaaggtggctccggccaccatcatcaccatcac

SEQ ID NO: 1958 - protein, 211 aa, synthetic construct
  REGION 1..211: note = Variant of 3'O-kinase
MAVTIGLTGGIAAGKSTVSAMMRELGLPVIDADEAARAVMKPGEEAYRDIVAEFGPGILRADGEIDRGKLRAIRFSDEQQRKVLNSIVGPAVLKKMLAEWEAHIGSGAKTVVLDIPLLFESGLQSWMDKVLVVYVDDDVQLRRLMARNGFAEEEALMRIRSQWPSAEKVKRADAVIDNNGNIEDTRRQLLDILHQWDLLDKGGSGHHHHHH

SEQ ID NO: 1959 - DNA, 633 bp, synthetic construct
  misc_feature 1..633: note = Variant of 3'O-kinase
  source 1..633: mol_type = other DNA
atggcggttaccattggtttaacaggagggatcgcagcgggcaaatcgactctgagtgccatgatgcgtgaactgggtctgccggtcatcgatgctgacgaggcagcacgcgccgttatgaagccaggcgaagaagcgtatcgcgacattgtagctgaattcgggccgggcatccttcgtgcggatggcgagatcgatcgcgggaaactgcgtgctatccgcttttcggacgaacaacaacgtaaggtgctgaattcgattgtaggtcctgcagtcctgaagaagatgctcgcggagtgggaagctcatatcgggtcaggcgccaagacggttgtgctggatatcccgctgctgttcgaatccggattgcaatcgtggatggacaaagttctcgtggtgtacgttgatgatgatgttcagttacgccgccttatggcacgtaacgggtttactgaagaagaagctctgatgcgcattcgttcacagtggcccagtgcggagaaagttaaacgtgcagacgctgtcatcgacaataatggcaatattgaagatacccgccgccagctgctggacattttacaccagtgggatctgctggacaaaggtggctccggccaccatcatcaccatcac

SEQ ID NO: 1960 - protein, 211 aa, synthetic construct
  REGION 1..211: note = Variant of 3'O-kinase
MAVTIGLTGGIAAGKSTLSAMMRELGLPVIDADEAARAVMKPGEEAYRDIVAEFGPGILRADGEIDRGKLRAIRFSDEQQRKVLNSIVGPAVLKKMLAEWEAHIGSGAKTVVLDIPLLFESGLQSWMDKVLVVYVDDDVQLRRLMARNGFTEEEALMRIRSQWPSAEKVKRADAVIDNNGNIEDTRRQLLDILHQWDLLDKGGSGHHHHHH

SEQ ID NO: 1961 - DNA, 633 bp, synthetic construct
  misc_feature 1..633: note = Variant of 3'O-kinase
  source 1..633: mol_type = other DNA
atggcggttaccattggtgtgacaggagggatcgcagcgggcaaatcgactgtgagtgccatgatgcgtgaactgggtctgccggtcatcgatgctgacgaggcagcacgcgccgttatgaagccaggcgaagaagcgtatcgcgacattgtagctgaattcgggccgggcatccttcgtgcggatggcgagatcgatcgcgggaaactgcgtgctatccgcttttcggacgaacaacaacgtaaggtgctgaattcgattgtaggtcctgcagtcctgaagaagatgctcgcggagtgggaagctcatatcgggtcaggcgccaagacggttgtgctggatatcccgctgctgttcgaatccggattgcaatcgtggatggacaaagttctcgtggtgtacgttgatgatgatgttcagttacgccgccttatggcacgtaacgggtttactgaagaagaagctctgatgcgcattcgttcacagtggcccagtgcggagaaagttaaacgtgcagacgctgtcatcgacaataatggcaatattgaagatacccgccgccagctgctggacattttacaccagtgggatctgctggacaaaggtggctccggccaccatcatcaccatcac

SEQ ID NO: 1962 - protein, 211 aa, synthetic construct
  REGION 1..211: note = Variant of 3'O-kinase
MAVTIGVTGGIAAGKSTVSAMMRELGLPVIDADEAARAVMKPGEEAYRDIVAEFGPGILRADGEIDRGKLRAIRFSDEQQRKVLNSIVGPAVLKKMLAEWEAHIGSGAKTVVLDIPLLFESGLQSWMDKVLVVYVDDDVQLRRLMARNGFTEEEALMRIRSQWPSAEKVKRADAVIDNNGNIEDTRRQLLDILHQWDLLDKGGSGHHHHHH

SEQ ID NO: 1963 - DNA, 633 bp, synthetic construct
  misc_feature 1..633: note = Variant of 3'O-kinase
  source 1..633: mol_type = other DNA
atggcggttaccattggtttaacaggagggatcgcagcgggcaaatcgactgtgagtgccatgatgcgtgaactgggtctgccggtcatcgatgctgacgaggcagcacgcgccgttatgaagccaggcgaagaagcgtatcgcgacattgtagctgaattcgggccgggcatccttcgtgcggatggcgagatcgatcgcgggaaactgcgtgctatccgcttttcggacgaacaacaacgtaaggtgctgaattcgattgtaggtcctgcagtcctgaagaagatgctcgcggagtgggaagctcatatcgggtcaggcgccaagacggttgtgctggatatcccgctgctgttcgaatccggattgcaatcgtggatggacaaagttctcgtggtgtacgttgatgatgatgttcagttacgccgccttatgaatcgtaacgggtttactgaagaagaagctctgatgcgcattcgttcacagtggcccagtgcggagaaagttaaacgtgcagacgctgtcatcgacaataatggcaatattgaagatacccgccgccagctgctggacattttacaccagtgggatctgctggacaaaggtggctccggccaccatcatcaccatcac

SEQ ID NO: 1964 - protein, 211 aa, synthetic construct
  REGION 1..211: note = Variant of 3'O-kinase
MAVTIGLTGGIAAGKSTVSAMMRELGLPVIDADEAARAVMKPGEEAYRDIVAEFGPGILRADGEIDRGKLRAIRFSDEQQRKVLNSIVGPAVLKKMLAEWEAHIGSGAKTVVLDIPLLFESGLQSWMDKVLVVYVDDDVQLRRLMNRNGFTEEEALMRIRSQWPSAEKVKRADAVIDNNGNIEDTRRQLLDILHQWDLLDKGGSGHHHHHH

SEQ ID NO: 1965 - DNA, 633 bp, synthetic construct
  misc_feature 1..633: note = Variant of 3'O-kinase
  source 1..633: mol_type = other DNA
atggcggttaccattggtttaacaggagggatcgcagcgggcaaatcgactgtgagtgccatgatgcgtgaactgggtctgccggtcatcgatgctgacgaggcagcacgcgccgttatgaagccaggcgaagaagcgtatcgcgacattgtagctgaattcgggccgggcatccttcgtgcggatggcgagatcgatcgcgggaaactgcgtgctatccgcaattcggacgaacaacaacgtaaggtgctgaattcgattgtaggtcctgcagtcctgaagaagatgctcgcggagtgggaagctcatatcgggtcaggcgccaagacggttgtgctggatatcccgctgctgttcgaatccggattgcaatcgtggatggacaaagttctcgtggtgtacgttgatgatgatgttcagttacgccgccttatggcacgtaacgggtttactgaagaagaagctctgatgcgcattcgttcacagtggcccagtgcggagaaagttaaacgtgcagacgctgtcatcgacaataatggcaatattgaagatacccgccgccagctgctggacattttacaccagtgggatctgctggacaaaggtggctccggccaccatcatcaccatcac

SEQ ID NO: 1966 - protein, 211 aa, synthetic construct
  REGION 1..211: note = Variant of 3'O-kinase
MAVTIGLTGGIAAGKSTVSAMMRELGLPVIDADEAARAVMKPGEEAYRDIVAEFGPGILRADGEIDRGKLRAIRNSDEQQRKVLNSIVGPAVLKKMLAEWEAHIGSGAKTVVLDIPLLFESGLQSWMDKVLVVYVDDDVQLRRLMARNGFTEEEALMRIRSQWPSAEKVKRADAVIDNNGNIEDTRRQLLDILHQWDLLDKGGSGHHHHHH

SEQ ID NO: 1967 - DNA, 633 bp, synthetic construct
  misc_feature 1..633: note = Variant of 3'O-kinase
  source 1..633: mol_type = other DNA
atggcggttaccattggtttaacaggagggatcgcagcgggcaaatcgactgtgagtgccatgatgcgtgaactgggtctgccggtcatcgatgctgacgaggcagcacgcgccgttatgaagccaggcgaagaagcgtatcgcgacattgtagctgaattcgggccgggcatccttcgtgcggatggcgagatcgatcgcgggaaactgcgtgctatccgcttttcggacgaacaacaacgtaaggtgctgaattcgattgtaggtcctgcagtcctgaagaagatgctcgcggagtgggaagctcatatcgggtcaggcgccaagacggttgtgctggatatcccgctgctgttcgaatccggattgcaatcgtggatggacaaagttctcgtggtgtacgttgatgatgatgttcagttacgccgccttatggcacgtaacgggtgtactgaagaagaagctctgatgcgcattcgttcacagtggcccagtgcggagaaagttaaacgtgcagacgctgtcatcgacaataatggcaatattgaagatacccgccgccagctgctggacattttacaccagtgggatctgctggacaaaggtggctccggccaccatcatcaccatcac

SEQ ID NO: 1968 - protein, 211 aa, synthetic construct
  REGION 1..211: note = Variant of 3'O-kinase
MAVTIGLTGGIAAGKSTVSAMMRELGLPVIDADEAARAVMKPGEEAYRDIVAEFGPGILRADGEIDRGKLRAIRFSDEQQRKVLNSIVGPAVLKKMLAEWEAHIGSGAKTVVLDIPLLFESGLQSWMDKVLVVYVDDDVQLRRLMARNGCTEEEALMRIRSQWPSAEKVKRADAVIDNNGNIEDTRRQLLDILHQWDLLDKGGSGHHHHHH

SEQ ID NO: 1969 - DNA, 633 bp, synthetic construct
  misc_feature 1..633: note = Variant of 3'O-kinase
  source 1..633: mol_type = other DNA
atggcggttaccattggtttaacaggagggatcgcagcgggcaaatcgactgtgagtgccatgatgcgtgaactgggtctgccggtcatcgatgctgacgaggcagcacgcgccgttatgaagccaggcgaagaagcgtatcgcgacattgtagctgaattcgggccgggcatccttcgtgcggatggcgagatcgataaggggaaactgcgtgctatccgcttttcggacgaacaacaacgtaaggtgctgaattcgattgtaggtcctgcagtcctgaagaagatgctcgcggagtgggaagctcatatcgggtcaggcgccaagacggttgtgctggatatcccgctgctgttcgaatccggattgcaatcgtggatggacaaagttctcgtggtgtacgttgatgatgatgttcagttacgccgccttatggcacgtaacgggtttactgaagaagaagctctgatgcgcattcgttcacagtggcccagtgcggagaaagttaaacgtgcagacgctgtcatcgacaataatggcaatattgaagatacccgccgccagctgctggacattttacaccagtgggatctgctggacaaaggtggctccggccaccatcatcaccatcac

SEQ ID NO: 1970 - protein, 211 aa, synthetic construct
  REGION 1..211: note = Variant of 3'O-kinase
MAVTIGLTGGIAAGKSTVSAMMRELGLPVIDADEAARAVMKPGEEAYRDIVAEFGPGILRADGEIDKGKLRAIRFSDEQQRKVLNSIVGPAVLKKMLAEWEAHIGSGAKTVVLDIPLLFESGLQSWMDKVLVVYVDDDVQLRRLMARNGFTEEEALMRIRSQWPSAEKVKRADAVIDNNGNIEDTRRQLLDILHQWDLLDKGGSGHHHHHH

SEQ ID NO: 1971 - DNA, 633 bp, synthetic construct
  misc_feature 1..633: note = Variant of 3'O-kinase
  source 1..633: mol_type = other DNA
atggcggttaccattggtttaacaggagggatcgcagcgggcaaatcgactgtgagtgccatgatgcgtgaactgggtctgccggtcatcgatgctgacgaggcagcacgcgccgttatgaagccaggcgaagaagcgtatcgcgacattgtagctgaattcgggccgggcatccttcgtgcggatggcgagatcgatcgcgggaaactgcgtgctatccgcttttcggacgaacaacaacgtaaggtgctgaattcgattgtaggtcctgcagtcctgaagaagatgctcgcggagtgggaagctcatatcgggtcaggcgccaagacggttgtgctggatatcccgctgctgttcgaatccggattgcaatcgtggatggacaaagttctcgtggtgtacgttgatgatgatgttcagttacgccgccttatggcacgtaacgggtttactgaagcggaagctctgatgcgcattcgttcacagtggcccagtgcggagaaagttaaacgtgcagacgctgtcatcgacaataatggcaatattgaagatacccgccgccagctgctggacattttacaccagtgggatctgctggacaaaggtggctccggccaccatcatcaccatcac

SEQ ID NO: 1972 - protein, 211 aa, synthetic construct
  REGION 1..211: note = Variant of 3'O-kinase
MAVTIGLTGGIAAGKSTVSAMMRELGLPVIDADEAARAVMKPGEEAYRDIVAEFGPGILRADGEIDRGKLRAIRFSDEQQRKVLNSIVGPAVLKKMLAEWEAHIGSGAKTVVLDIPLLFESGLQSWMDKVLVVYVDDDVQLRRLMARNGFTEAEALMRIRSQWPSAEKVKRADAVIDNNGNIEDTRRQLLDILHQWDLLDKGGSGHHHHHH

SEQ ID NO: 1973 - DNA, 633 bp, synthetic construct
  misc_feature 1..633: note = Variant of 3'O-kinase
  source 1..633: mol_type = other DNA
atggcggttaccattggtttaacaggagggatcgcagcgggcaaatcgactgtgagtgccatgatgcgtgaactgggtctgccggtcatcgatgctgacgaggcagcacgcgccgttatgaagccaggcgaagaagcgtatcgcgacattgtagctgaattcgggccgggcatccttcgtgcggatggcgagatcgatcgcgggaaactgcgtgctatccgcttttcggacgaacaacaacgtaaggtgctgaattcgattgtaggtcctgcagtcctgaagaagatgctcgcggagtgggaagctcatatcgggtcaggcgccaagacggttgtgctggatatcccgctgctgttcgaatccggattgcaatcgtggatggacaaagttctcgtggtgtacgttgatgatgatgttcagttacgccgccttatggcacgtaacgggtttactgaagaagaagctctgatgcgcattcgttcacagtggcccagtgcggagaaagttaaacgtgcagacgctgtcatcgacaataatggcaatccggaagatacccgccgccagctgctggacattttacaccagtgggatctgctggacaaaggtggctccggccaccatcatcaccatcac

SEQ ID NO: 1974 - protein, 211 aa, synthetic construct
  REGION 1..211: note = Variant of 3'O-kinase
MAVTIGLTGGIAAGKSTVSAMMRELGLPVIDADEAARAVMKPGEEAYRDIVAEFGPGILRADGEIDRGKLRAIRFSDEQQRKVLNSIVGPAVLKKMLAEWEAHIGSGAKTVVLDIPLLFESGLQSWMDKVLVVYVDDDVQLRRLMARNGFTEEEALMRIRSQWPSAEKVKRADAVIDNNGNPEDTRRQLLDILHQWDLLDKGGSGHHHHHH

SEQ ID NO: 1975 - DNA, 633 bp, synthetic construct
  misc_feature 1..633: note = Variant of 3'O-kinase
  source 1..633: mol_type = other DNA
atggcggttaccattggtttaacaggagggatcgcagcgggcaaatcgactgtgagtgccatgatgcgtgaactgggtctgccggtcatcgatgctgacgaggcagcacgcgccgttatgaagccaggcgaagaagcgtatcgcgacattgtagctgaattcgggccgggcatccttcgtgcggatggcgagatcgatcgcgggaaactgcgtgctatccgcttttcggacgaacaacaacgtaaggtgctgaattcgattgtaggtcctgcagtcctgaagaagatgctcgcggagtgggaagctcatatcgggtcaggcgccaagacggttgtgctggatatcccgctgctgttcgaatccggattgcaatcgtggatggacaaagttctcgtggtgtacgttgatgatgatgttcagttacgccgccttatggcacgtaacgggtttactgaagaagaagctctgatgcgcattcgttcacagtggcccagtgcggagaaagttaaacgtgcagacgctgtcatcgacaataatggcaatattgaagatgcgcgccgccagctgctggacattttacaccagtgggatctgctggacaaaggtggctccggccaccatcatcaccatcac

SEQ ID NO: 1976 - protein, 211 aa, synthetic construct
  REGION 1..211: note = Variant of 3'O-kinase
MAVTIGLTGGIAAGKSTVSAMMRELGLPVIDADEAARAVMKPGEEAYRDIVAEFGPGILRADGEIDRGKLRAIRFSDEQQRKVLNSIVGPAVLKKMLAEWEAHIGSGAKTVVLDIPLLFESGLQSWMDKVLVVYVDDDVQLRRLMARNGFTEEEALMRIRSQWPSAEKVKRADAVIDNNGNIEDARRQLLDILHQWDLLDKGGSGHHHHHH

SEQ ID NO: 1977 - DNA, 633 bp, synthetic construct
  misc_feature 1..633: note = Variant of 3'O-kinase
  source 1..633: mol_type = other DNA
atggcggttaccattggtttaacaggagggatcgcagcgggcaaatcgactgtgagtgccatgatgcgtgaactgggtctgccggtcatcgatgctgacgaggcagcacgcgccgttatgaagccaggcgaagaagcgtatcgcgacattgtagctgaattcgggccgggcatccttcgtgcggatggcgagatcgatcgctataaactgcgtgctatccgcttttcggacgaacaacaacgtaaggtgctgaattcgattgtaggtcctgcagtcctgaagaagatgctcgcggagtgggaagctcatatcgggtcaggcgccaagacggttgtgctggatatcccgctgctgttcgaatccggattgcaatcgtggatggacaaagttctcgtggtgtacgttgatgatgatgttcagttacgccgccttatggcacgtaacgggtttactgaagaagaagctctgatgcgcattcgttcacagtggcccagtgcggagaaagttaaacgtgcagacgctgtcatcgacaataatggcaatattgaagatacccgccgccagctgctggacattttacaccagtgggatctgctggacaaaggtggctccggccaccatcatcaccatcac

SEQ ID NO: 1978 - protein, 211 aa, synthetic construct
  REGION 1..211: note = Variant of 3'O-kinase
MAVTIGLTGGIAAGKSTVSAMMRELGLPVIDADEAARAVMKPGEEAYRDIVAEFGPGILRADGEIDRYKLRAIRFSDEQQRKVLNSIVGPAVLKKMLAEWEAHIGSGAKTVVLDIPLLFESGLQSWMDKVLVVYVDDDVQLRRLMARNGFTEEEALMRIRSQWPSAEKVKRADAVIDNNGNIEDTRRQLLDILHQWDLLDKGGSGHHHHHH

SEQ ID NO: 1979 - DNA, 633 bp, synthetic construct
  misc_feature 1..633: note = Variant of 3'O-kinase
  source 1..633: mol_type = other DNA
atggcggttaccattggtttaacaggagggatcgcagcgggcaaatcgactgtgagtgccatgatgcgtgaactgggtctgccggtcatcgatgctgacgaggcagcacgcgccgttatgaagccaggcgaagaagcgtatcgcgacattgtagctgaattcgggccgggcatccttcgtgcggatggcgagatcgatcgcgggaaactgcgtgctatccgcttttcggacgaacaacaacgtaaggtgctgaattcgattgtaggtcctgcagtcctgaagaagatgctcgcggagtgggaagctcatatcgggtcaggcgccaagacggttgtgctggatatcccgctgctgttcgaatccggattgcaatcgtggatggacaaagttctcgtggtgtacgttgatgatgatgttcagttacgccgccttatggcacgtaacgggtttactgaagaagaagctctgatgcgcattacttcacagtggcccagtgcggagaaagttaaacgtgcagacgctgtcatcgacaataatggcaatattgaagatacccgccgccagctgctggacattttacaccagtgggatctgctggacaaaggtggctccggccaccatcatcaccatcac

SEQ ID NO: 1980 - protein, 211 aa, synthetic construct
  REGION 1..211: note = Variant of 3'O-kinase
MAVTIGLTGGIAAGKSTVSAMMRELGLPVIDADEAARAVMKPGEEAYRDIVAEFGPGILRADGEIDRGKLRAIRFSDEQQRKVLNSIVGPAVLKKMLAEWEAHIGSGAKTVVLDIPLLFESGLQSWMDKVLVVYVDDDVQLRRLMARNGFTEEEALMRITSQWPSAEKVKRADAVIDNNGNIEDTRRQLLDILHQWDLLDKGGSGHHHHHH

SEQ ID NO: 1981 - DNA, 633 bp, synthetic construct
  misc_feature 1..633: note = Variant of 3'O-kinase
  source 1..633: mol_type = other DNA
atggcggttaccattggtttaacaggagggatcgcagcgggcaaatcgactgtgagtgccatgatgcgtgaactgggtctgccggtcatcgatgctgacgaggcagcacgcgccgttatgaagccaggcgaagaagcgtatcgcgacattgtagctgaattcgggccgggcatccttcgtgcggatggcgagatcgatcgcgggaaactgcgtgctatccgcttttcggacgaacaacaacgtaaggtgctgaattcgattgtaggtcctgcagtcctgaagaagatgctcgcggagtgggaagctcatatcgggtcaggcgccaagacggttgtgctggatatcccgctgctgttcgaatccggattgcaatcgtggatggacaaagttctcgtggtgtacgttgatgatgatgttcagttacgccgccttatggcacgtaacgggtttactgaagaagaagctctgatgcgcattagttcacagtggcccagtgcggagaaagttaaacgtgcagacgctgtcatcgacaataatggcaatattgaagatacccgccgccagctgctggacattttacaccagtgggatctgctggacaaaggtggctccggccaccatcatcaccatcac

SEQ ID NO: 1982 - protein, 211 aa, synthetic construct
  REGION 1..211: note = Variant of 3'O-kinase
MAVTIGLTGGIAAGKSTVSAMMRELGLPVIDADEAARAVMKPGEEAYRDIVAEFGPGILRADGEIDRGKLRAIRFSDEQQRKVLNSIVGPAVLKKMLAEWEAHIGSGAKTVVLDIPLLFESGLQSWMDKVLVVYVDDDVQLRRLMARNGFTEEEALMRISSQWPSAEKVKRADAVIDNNGNIEDTRRQLLDILHQWDLLDKGGSGHHHHHH

SEQ ID NO: 1983 - DNA, 633 bp, synthetic construct
  misc_feature 1..633: note = Variant of 3'O-kinase
  source 1..633: mol_type = other DNA
atggcggttaccattggtttaacaggagggatcgcagcgggcaaatcgactgtgagtgccatgatgcgtgaactgggtctgccggtcatcgatgctgacgaggcagcacgcgccgttatgaagccaggcgaagaagcgtatcgcgacattgtagctgaattcgggccgggcatccttcgtgcggatggcgagatcgatcgcgggaaactgcgtgctatccgcttttcggacgaacaacaacgtaaggtgctgaattcgattgtaggtcctgcagtcctgaagaagatgctcgcggagtgggaagctcatatcgggtcaggcgccaagacggttgtgctggatatcccgctgctgttcgaatccggattgcaatcgtggatggacaaagttctcgtggtgtacgttgatgatgatgttcagttacgccgccttatggcacgtaacgggtttactgaagaagaagctctgatgcgcattgtgtcacagtggcccagtgcggagaaagttaaacgtgcagacgctgtcatcgacaataatggcaatattgaagatacccgccgccagctgctggacattttacaccagtgggatctgctggacaaaggtggctccggccaccatcatcaccatcac

SEQ ID NO: 1984 - protein, 211 aa, synthetic construct
  REGION 1..211: note = Variant of 3'O-kinase
MAVTIGLTGGIAAGKSTVSAMMRELGLPVIDADEAARAVMKPGEEAYRDIVAEFGPGILRADGEIDRGKLRAIRFSDEQQRKVLNSIVGPAVLKKMLAEWEAHIGSGAKTVVLDIPLLFESGLQSWMDKVLVVYVDDDVQLRRLMARNGFTEEEALMRIVSQWPSAEKVKRADAVIDNNGNIEDTRRQLLDILHQWDLLDKGGSGHHHHHH

SEQ ID NO: 1985 - DNA, 633 bp, synthetic construct
  misc_feature 1..633: note = Variant of 3'O-kinase
  source 1..633: mol_type = other DNA
atggcggttaccattggtttaacaggagggatcgcagcgggcaaatcgactgtgagtgccatgatgcgtgaactgggtctgccggtcatcgatgctgacgagatggcacgcgccgttatgaagccaggcgaagaagcgtatcgcgacattgtagctgaattcgggccgggcatccttcgtgcggatggcgagatcgatcgcgggaaactgcgtgctatccgcttttcggacgaacaacaacgtaaggtgctgaattcgattgtaggtcctgcagtcctgaagaagatgctcgcggagtgggaagctcatatcgggtcaggcgccaagacggttgtgctggatatcccgctgctgttcgaatccggattgcaatcgtggatggacaaagttctcgtggtgtacgttgatgatgatgttcagttacgccgccttatggcacgtaacgggtttactgaagaagaagctctgatgcgcattcgttcacagtggcccagtgcggagaaagttaaacgtgcagacgctgtcatcgacaataatggcaatattgaagatacccgccgccagctgctggacattttacaccagtgggatctgctggacaaaggtggctccggccaccatcatcaccatcac

SEQ ID NO: 1986 - protein, 211 aa, synthetic construct
  REGION 1..211: note = Variant of 3'O-kinase
MAVTIGLTGGIAAGKSTVSAMMRELGLPVIDADEMARAVMKPGEEAYRDIVAEFGPGILRADGEIDRGKLRAIRFSDEQQRKVLNSIVGPAVLKKMLAEWEAHIGSGAKTVVLDIPLLFESGLQSWMDKVLVVYVDDDVQLRRLMARNGFTEEEALMRIRSQWPSAEKVKRADAVIDNNGNIEDTRRQLLDILHQWDLLDKGGSGHHHHHH

SEQ ID NO: 1987 - DNA, 633 bp, synthetic construct
  misc_feature 1..633: note = Variant of 3'O-kinase
  source 1..633: mol_type = other DNA
atggcggttaccattggtttaacaggagggatcgcagcgggcaaatcgactgtgagtgccatgatgcgtgaactgggtctgccggtcatcgatgctgacgaggcagcacgcgccgttatgaagccaggcgaagaagcgtatcgcgacattgtagctgaattcgggccgggcatccttcgtgcggatggcgagatcgatcgcgggaaactgcgtgctatccgcttttcggacgaacaacaacgtaaggtgctgaattcgattgtaggtcctgcagtcctgaagaagatgctcgcggagtgggaagctcatatcgggtcaggcgccaagacggttgtgctggatatcccgctgctgttcgaatccggattgcaatcgtgggctgacaaagttctcgtggtgtacgttgatgatgatgttcagttacgccgccttatggcacgtaacgggtttactgaagaagaagctctgatgcgcattcgttcacagtggcccagtgcggagaaagttaaacgtgcagacgctgtcatcgacaataatggcaatattgaagatacccgccgccagctgctggacattttacaccagtgggatctgctggacaaaggtggctccggccaccatcatcaccatcac

SEQ ID NO: 1988 - protein, 211 aa, synthetic construct
  REGION 1..211: note = Variant of 3'O-kinase
MAVTIGLTGGIAAGKSTVSAMMRELGLPVIDADEAARAVMKPGEEAYRDIVAEFGPGILRADGEIDRGKLRAIRFSDEQQRKVLNSIVGPAVLKKMLAEWEAHIGSGAKTVVLDIPLLFESGLQSWADKVLVVYVDDDVQLRRLMARNGFTEEEALMRIRSQWPSAEKVKRADAVIDNNGNIEDTRRQLLDILHQWDLLDKGGSGHHHHHH

SEQ ID NO: 1989 - DNA, 633 bp, synthetic construct
  misc_feature 1..633: note = Variant of 3'O-kinase
  source 1..633: mol_type = other DNA
atggcggttaccattggtttaacaggagggatcgcagcgggcaaatcgactgtgagtgccatgatgcgtgaactgggtctgccggtcatcgatgctgacgaggcagcacgcgccgttatgaagccaggcgaagaagcgtatcgcgacattgtagctgaattcgggccgggcatccttcgtgcggatggcgagatcgatcgcgggaaactgcgtgctatccgcttttcggacgaacaacaacgtaaggtgctgaattcgattgtaggtcctgcagtcctgaagaagatgctcgcggagtgggaagctcatatcgggtcaggcgccaagacggttgtgtgggatatcccgctgctgttcgaatccggattgcaatcgtggatggacaaagttctcgtggtgtacgttgatgatgatgttcagttacgccgccttatggcacgtaacgggtttactgaagaagaagctctgatgcgcattcgttcacagtggcccagtgcggagaaagttaaacgtgcagacgctgtcatcgacaataatggcaatattgaagatacccgccgccagctgctggacattttacaccagtgggatctgctggacaaaggtggctccggccaccatcatcaccatcac

SEQ ID NO: 1990 - protein, 211 aa, synthetic construct
  REGION 1..211: note = Variant of 3'O-kinase
MAVTIGLTGGIAAGKSTVSAMMRELGLPVIDADEAARAVMKPGEEAYRDIVAEFGPGILRADGEIDRGKLRAIRFSDEQQRKVLNSIVGPAVLKKMLAEWEAHIGSGAKTVVWDIPLLFESGLQSWMDKVLVVYVDDDVQLRRLMARNGFTEEEALMRIRSQWPSAEKVKRADAVIDNNGNIEDTRRQLLDILHQWDLLDKGGSGHHHHHH

SEQ ID NO: 1991 - DNA, 633 bp, synthetic construct
  misc_feature 1..633: note = Variant of 3'O-kinase
  source 1..633: mol_type = other DNA
atggcggttaccattggtttaacaggagggatcgcagcgggcaaatcgactgtgagtgccatgatgcgtgaactgggtctgccggtcgtggatgctgacgaggcagcacgcgccgttatgaagccaggcgaagaagcgtatcgcgacattgtagctgaattcgggccgggcatccttcgtgcggatggcgagatcgatcgcgggaaactgcgtgctatccgcttttcggacgaacaacaacgtaaggtgctgaattcgattgtaggtcctgcagtcctgaagaagatgctcgcggagtgggaagctcatatcgggtcaggcgccaagacggttgtgctggatatcccgctgctgttcgaatccggattgcaatcgtggatggacaaagttctcgtggtgtacgttgatgatgatgttcagttacgccgccttatggcacgtaacgggtttactgaagaagaagctctgatgcgcattcgttcacagtggcccagtgcggagaaagttaaacgtgcagacgctgtcatcgacaataatggcaatattgaagatacccgccgccagctgctggacattttacaccagtgggatctgctggacaaaggtggctccggccaccatcatcaccatcac

SEQ ID NO: 1992 - protein, 211 aa, synthetic construct
  REGION 1..211: note = Variant of 3'O-kinase
MAVTIGLTGGIAAGKSTVSAMMRELGLPVVDADEAARAVMKPGEEAYRDIVAEFGPGILRADGEIDRGKLRAIRFSDEQQRKVLNSIVGPAVLKKMLAEWEAHIGSGAKTVVLDIPLLFESGLQSWMDKVLVVYVDDDVQLRRLMARNGFTEEEALMRIRSQWPSAEKVKRADAVIDNNGNIEDTRRQLLDILHQWDLLDKGGSGHHHHHH

SEQ ID NO: 1993 - DNA, 633 bp, synthetic construct
  misc_feature 1..633: note = Variant of 3'O-kinase
  source 1..633: mol_type = other DNA
atggcggttaccattggtttaacaggagggatcgcagcgggcaaatcgactgtgagtgccatgatgcgtgaactgggtctgccggtcatcgatgctgacgaggcagcacgcgccgttatgaagccaggcgaagaagcgtatcgcgacattgtagctgaattcgggccgggcatccttcgtgcggatggcgagatcgatcgcgggaaactgcgtgctatccgcttttcggacgaacaacaacgtaaggtgctgaattcgattgtaggtcctgcagtcctgaaggttatgctcgcggagtgggaagctcatatcgggtcaggcgccaagacggttgtgctggatatcccgctgctgttcgaatccggattgcaatcgtggatggacaaagttctcgtggtgtacgttgatgatgatgttcagttacgccgccttatggcacgtaacgggtttactgaagaagaagctctgatgcgcattcgttcacagtggcccagtgcggagaaagttaaacgtgcagacgctgtcatcgacaataatggcaatattgaagatacccgccgccagctgctggacattttacaccagtgggatctgctggacaaaggtggctccggccaccatcatcaccatcac

SEQ ID NO: 1994 - protein, 211 aa, synthetic construct
  REGION 1..211: note = Variant of 3'O-kinase
MAVTIGLTGGIAAGKSTVSAMMRELGLPVIDADEAARAVMKPGEEAYRDIVAEFGPGILRADGEIDRGKLRAIRFSDEQQRKVLNSIVGPAVLKVMLAEWEAHIGSGAKTVVLDIPLLFESGLQSWMDKVLVVYVDDDVQLRRLMARNGFTEEEALMRIRSQWPSAEKVKRADAVIDNNGNIEDTRRQLLDILHQWDLLDKGGSGHHHHHH

SEQ ID NO: 1995 - DNA, 633 bp, synthetic construct
  misc_feature 1..633: note = Variant of 3'O-kinase
  source 1..633: mol_type = other DNA
atggcggttaccattggtttaacaggagggatcgcagcgggcaaatcgactgtgagtgccatgatgcgtgaactgggtctgccggtcatcgatgctgacgaggcagcacgcgccgttcggaagccaggcgaagaagcgtatcgcgacattgtagctgaattcgggccgggcatccttcgtgcggatggcgagatcgatcgcgggaaactgcgtgctatccgcttttcggacgaacaacaacgtaaggtgctgaattcgattgtaggtcctgcagtcctgaagaagatgctcgcggagtgggaagctcatatcgggtcaggcgccaagacggttgtgctggatatcccgctgctgttcgaatccggattgcaatcgtggatggacaaagttctcgtggtgtacgttgatgatgatgttcagttacgccgccttatggcacgtaacgggtttactgaagaagaagctctgatgcgcattcgttcacagtggcccagtgcggagaaagttaaacgtgcagacgctgtcatcgacaataatggcaatattgaagatacccgccgccagctgctggacattttacaccagtgggatctgctggacaaaggtggctccggccaccatcatcaccatcac

SEQ ID NO: 1996 - protein, 211 aa, synthetic construct
  REGION 1..211: note = Variant of 3'O-kinase
MAVTIGLTGGIAAGKSTVSAMMRELGLPVIDADEAARAVRKPGEEAYRDIVAEFGPGILRADGEIDRGKLRAIRFSDEQQRKVLNSIVGPAVLKKMLAEWEAHIGSGAKTVVLDIPLLFESGLQSWMDKVLVVYVDDDVQLRRLMARNGFTEEEALMRIRSQWPSAEKVKRADAVIDNNGNIEDTRRQLLDILHQWDLLDKGGSGHHHHHH

SEQ ID NO: 1997 - DNA, 633 bp, synthetic construct
  misc_feature 1..633: note = Variant of 3'O-kinase
  source 1..633: mol_type = other DNA
atggcggttaccattggtttaacaggagggatcgcagcgggcaaatcgactgtgagtgccatgatgcgtgaactgggtctgccggtcatcgatgctgacgaggcagcacgcgccgttatgaagccaggcgaagaagcgtatcgcgacattgtagctgaattcgggccgggcatccttcgtgcggatggcgagatcgatcgcgggaaactgcgtgctatccgcttttcggacgaacaacaacgtaaggtgctgaattcgattgtaatgcctgcagtcctgaagaagatgctcgcggagtgggaagctcatatcgggtcaggcgccaagacggttgtgctggatatcccgctgctgttcgaatccggattgcaatcgtggatggacaaagttctcgtggtgtacgttgatgatgatgttcagttacgccgccttatggcacgtaacgggtttactgaagaagaagctctgatgcgcattcgttcacagtggcccagtgcggagaaagttaaacgtgcagacgctgtcatcgacaataatggcaatattgaagatacccgccgccagctgctggacattttacaccagtgggatctgctggacaaaggtggctccggccaccatcatcaccatcac

SEQ ID NO: 1998 - protein, 211 aa, synthetic construct
  REGION 1..211: note = Variant of 3'O-kinase
MAVTIGLTGGIAAGKSTVSAMMRELGLPVIDADEAARAVMKPGEEAYRDIVAEFGPGILRADGEIDRGKLRAIRFSDEQQRKVLNSIVMPAVLKKMLAEWEAHIGSGAKTVVLDIPLLFESGLQSWMDKVLVVYVDDDVQLRRLMARNGFTEEEALMRIRSQWPSAEKVKRADAVIDNNGNIEDTRRQLLDILHQWDLLDKGGSGHHHHHH

SEQ ID NO: 1999 - DNA, 633 bp, synthetic construct
  misc_feature 1..633: note = Variant of 3'O-kinase
  source 1..633: mol_type = other DNA
atggcggttaccattggtttaacaggagggatcgcagcgggcaaatcgactgtgagtgccatgatgcgtgaactgggtctgccggtcatcgatgctgacgagcgggcacgcgccgttatgaagccaggcgaagaagcgtatcgcgacattgtagctgaattcgggccgggcatccttcgtgcggatggcgagatcgatcgcgggaaactgcgtgctatccgcttttcggacgaacaacaacgtaaggtgctgaattcgattgtaggtcctgcagtcctgaagaagatgctcgcggagtgggaagctcatatcgggtcaggcgccaagacggttgtgctggatatcccgctgctgttcgaatccggattgcaatcgtggatggacaaagttctcgtggtgtacgttgatgatgatgttcagttacgccgccttatggcacgtaacgggtttactgaagaagaagctctgatgcgcattcgttcacagtggcccagtgcggagaaagttaaacgtgcagacgctgtcatcgacaataatggcaatattgaagatacccgccgccagctgctggacattttacaccagtgggatctgctggacaaaggtggctccggccaccatcatcaccatcac

SEQ ID NO: 2000 - protein, 211 aa, synthetic construct
  REGION 1..211: note = Variant of 3'O-kinase
MAVTIGLTGGIAAGKSTVSAMMRELGLPVIDADERARAVMKPGEEAYRDIVAEFGPGILRADGEIDRGKLRAIRFSDEQQRKVLNSIVGPAVLKKMLAEWEAHIGSGAKTVVLDIPLLFESGLQSWMDKVLVVYVDDDVQLRRLMARNGFTEEEALMRIRSQWPSAEKVKRADAVIDNNGNIEDTRRQLLDILHQWDLLDKGGSGHHHHHH

SEQ ID NO: 2001 - DNA, 633 bp, synthetic construct
  misc_feature 1..633: note = Variant of 3'O-kinase
  source 1..633: mol_type = other DNA
atggcggttaccattggtttaacaggagggatcgcagcgggcaaatcgactgtgagtgccatgatgcgtgaactgggtctgccggtcatcgatgctgacgaggatgcacgcgccgttatgaagccaggcgaagaagcgtatcgcgacattgtagctgaattcgggccgggcatccttcgtgcggatggcgagatcgatcgcgggaaactgcgtgctatccgcttttcggacgaacaacaacgtaaggtgctgaattcgattgtaggtcctgcagtcctgaagaagatgctcgcggagtgggaagctcatatcgggtcaggcgccaagacggttgtgctggatatcccgctgctgttcgaatccggattgcaatcgtggatggacaaagttctcgtggtgtacgttgatgatgatgttcagttacgccgccttatggcacgtaacgggtttactgaagaagaagctctgatgcgcattcgttcacagtggcccagtgcggagaaagttaaacgtgcagacgctgtcatcgacaataatggcaatattgaagatacccgccgccagctgctggacattttacaccagtgggatctgctggacaaaggtggctccggccaccatcatcaccatcac

SEQ ID NO: 2002 - protein, 211 aa, synthetic construct
  REGION 1..211: note = Variant of 3'O-kinase
MAVTIGLTGGIAAGKSTVSAMMRELGLPVIDADEDARAVMKPGEEAYRDIVAEFGPGILRADGEIDRGKLRAIRFSDEQQRKVLNSIVGPAVLKKMLAEWEAHIGSGAKTVVLDIPLLFESGLQSWMDKVLVVYVDDDVQLRRLMARNGFTEEEALMRIRSQWPSAEKVKRADAVIDNNGNIEDTRRQLLDILHQWDLLDKGGSGHHHHHH

SEQ ID NO: 2003 - DNA, 633 bp, synthetic construct
  misc_feature 1..633: note = Variant of 3'O-kinase
  source 1..633: mol_type = other DNA
atggcggttaccattggtttaacaggagggatcgcagcgggcaaatcgactgtgagttcgatgatgcgtgaactgggtctgccggtcatcgatgctgacgaggcagcacgcgccgttatgaagccaggcgaagaagcgtatcgcgacattgtagctgaattcgggccgggcatccttcgtgcggatggcgagatcgatcgcgggaaactgcgtgctatccgcttttcggacgaacaacaacgtaaggtgctgaattcgattgtaggtcctgcagtcctgaagaagatgctcgcggagtgggaagctcatatcgggtcaggcgccaagacggttgtgctggatatcccgctgctgttcgaatccggattgcaatcgtggatggacaaagttctcgtggtgtacgttgatgatgatgttcagttacgccgccttatggcacgtaacgggtttactgaagaagaagctctgatgcgcattcgttcacagtggcccagtgcggagaaagttaaacgtgcagacgctgtcatcgacaataatggcaatattgaagatacccgccgccagctgctggacattttacaccagtgggatctgctggacaaaggtggctccggccaccatcatcaccatcac

SEQ ID NO: 2004 - protein, 211 aa, synthetic construct
  REGION 1..211: note = Variant of 3'O-kinase
MAVTIGLTGGIAAGKSTVSSMMRELGLPVIDADEAARAVMKPGEEAYRDIVAEFGPGILRADGEIDRGKLRAIRFSDEQQRKVLNSIVGPAVLKKMLAEWEAHIGSGAKTVVLDIPLLFESGLQSWMDKVLVVYVDDDVQLRRLMARNGFTEEEALMRIRSQWPSAEKVKRADAVIDNNGNIEDTRRQLLDILHQWDLLDKGGSGHHHHHH

SEQ ID NO: 2005 - DNA, 633 bp, synthetic construct
  misc_feature 1..633: note = Variant of 3'O-kinase
  source 1..633: mol_type = other DNA
atggcggttaccattggtttaacaggagggatcgcagcgggcaaatcgactgtgagtattatgatgcgtgaactgggtctgccggtcatcgatgctgacgaggcagcacgcgccgttatgaagccaggcgaagaagcgtatcgcgacattgtagctgaattcgggccgggcatccttcgtgcggatggcgagatcgatcgcgggaaactgcgtgctatccgcttttcggacgaacaacaacgtaaggtgctgaattcgattgtaggtcctgcagtcctgaagaagatgctcgcggagtgggaagctcatatcgggtcaggcgccaagacggttgtgctggatatcccgctgctgttcgaatccggattgcaatcgtggatggacaaagttctcgtggtgtacgttgatgatgatgttcagttacgccgccttatggcacgtaacgggtttactgaagaagaagctctgatgcgcattcgttcacagtggcccagtgcggagaaagttaaacgtgcagacgctgtcatcgacaataatggcaatattgaagatacccgccgccagctgctggacattttacaccagtgggatctgctggacaaaggtggctccggccaccatcatcaccatcac

SEQ ID NO: 2006 - protein, 211 aa, synthetic construct
  REGION 1..211: note = Variant of 3'O-kinase
MAVTIGLTGGIAAGKSTVSIMMRELGLPVIDADEAARAVMKPGEEAYRDIVAEFGPGILRADGEIDRGKLRAIRFSDEQQRKVLNSIVGPAVLKKMLAEWEAHIGSGAKTVVLDIPLLFESGLQSWMDKVLVVYVDDDVQLRRLMARNGFTEEEALMRIRSQWPSAEKVKRADAVIDNNGNIEDTRRQLLDILHQWDLLDKGGSGHHHHHH

SEQ ID NO: 2007 - DNA, 633 bp, synthetic construct
  misc_feature 1..633: note = Variant of 3'O-kinase
  source 1..633: mol_type = other DNA
atggcggttaccattggtttaacaggagggatcgcagcgggcaaatcgactgtgagtaagatgatgcgtgaactgggtctgccggtcatcgatgctgacgaggcagcacgcgccgttatgaagccaggcgaagaagcgtatcgcgacattgtagctgaattcgggccgggcatccttcgtgcggatggcgagatcgatcgcgggaaactgcgtgctatccgcttttcggacgaacaacaacgtaaggtgctgaattcgattgtaggtcctgcagtcctgaagaagatgctcgcggagtgggaagctcatatcgggtcaggcgccaagacggttgtgctggatatcccgctgctgttcgaatccggattgcaatcgtggatggacaaagttctcgtggtgtacgttgatgatgatgttcagttacgccgccttatggcacgtaacgggtttactgaagaagaagctctgatgcgcattcgttcacagtggcccagtgcggagaaagttaaacgtgcagacgctgtcatcgacaataatggcaatattgaagatacccgccgccagctgctggacattttacaccagtgggatctgctggacaaaggtggctccggccaccatcatcaccatcac

SEQ ID NO: 2008 - protein, 211 aa, synthetic construct
  REGION 1..211: note = Variant of 3'O-kinase
MAVTIGLTGGIAAGKSTVSKMMRELGLPVIDADEAARAVMKPGEEAYRDIVAEFGPGILRADGEIDRGKLRAIRFSDEQQRKVLNSIVGPAVLKKMLAEWEAHIGSGAKTVVLDIPLLFESGLQSWMDKVLVVYVDDDVQLRRLMARNGFTEEEALMRIRSQWPSAEKVKRADAVIDNNGNIEDTRRQLLDILHQWDLLDKGGSGHHHHHH

SEQ ID NO: 2009 - DNA, 633 bp, synthetic construct
  misc_feature 1..633: note = Variant of 3'O-kinase
  source 1..633: mol_type = other DNA
atggcggttaccattggtttaacaggagggatcgcagcgggcaaatcgactgtgagtgccatgatgcgtgaactgggtctgccggtcatcgatgctgacgaggcatctcgcgccgttatgaagccaggcgaagaagcgtatcgcgacattgtagctgaattcgggccgggcatccttcgtgcggatggcgagatcgatcgcgggaaactgcgtgctatccgcttttcggacgaacaacaacgtaaggtgctgaattcgattgtaggtcctgcagtcctgaagaagatgctcgcggagtgggaagctcatatcgggtcaggcgccaagacggttgtgctggatatcccgctgctgttcgaatccggattgcaatcgtggatggacaaagttctcgtggtgtacgttgatgatgatgttcagttacgccgccttatggcacgtaacgggtttactgaagaagaagctctgatgcgcattcgttcacagtggcccagtgcggagaaagttaaacgtgcagacgctgtcatcgacaataatggcaatattgaagatacccgccgccagctgctggacattttacaccagtgggatctgctggacaaaggtggctccggccaccatcatcaccatcac

SEQ ID NO: 2010 - protein, 211 aa, synthetic construct
  REGION 1..211: note = Variant of 3'O-kinase
MAVTIGLTGGIAAGKSTVSAMMRELGLPVIDADEASRAVMKPGEEAYRDIVAEFGPGILRADGEIDRGKLRAIRFSDEQQRKVLNSIVGPAVLKKMLAEWEAHIGSGAKTVVLDIPLLFESGLQSWMDKVLVVYVDDDVQLRRLMARNGFTEEEALMRIRSQWPSAEKVKRADAVIDNNGNIEDTRRQLLDILHQWDLLDKGGSGHHHHHH

SEQ ID NO: 2011 - DNA, 633 bp, synthetic construct
  misc_feature 1..633: note = Variant of 3'O-kinase
  source 1..633: mol_type = other DNA
atggcggttaccattggtttaacaggagggatcgcagcgggcaaatcgactgtgagtgccatgatgcgtgaactgggtctgccggtcatcgatgctgacgaggcagcacgcgccgttatgaagccaggcgaagaagcgtatcgcgacattgtagctgaattcgggccgggcatccttcgtgcggatggcgagatcgatcgcgggaaactgcgtgctatccgcttttcggacgaacaacaacgtaaggtgctggagtcgattgtaggtcctgcagtcctgaagaagatgctcgcggagtgggaagctcatatcgggtcaggcgccaagacggttgtgctggatatcccgctgctgttcgaatccggattgcaatcgtggatggacaaagttctcgtggtgtacgttgatgatgatgttcagttacgccgccttatggcacgtaacgggtttactgaagaagaagctctgatgcgcattcgttcacagtggcccagtgcggagaaagttaaacgtgcagacgctgtcatcgacaataatggcaatattgaagatacccgccgccagctgctggacattttacaccagtgggatctgctggacaaaggtggctccggccaccatcatcaccatcac

SEQ ID NO: 2012 - protein, 211 aa, synthetic construct
  REGION 1..211: note = Variant of 3'O-kinase
MAVTIGLTGGIAAGKSTVSAMMRELGLPVIDADEAARAVMKPGEEAYRDIVAEFGPGILRADGEIDRGKLRAIRFSDEQQRKVLESIVGPAVLKKMLAEWEAHIGSGAKTVVLDIPLLFESGLQSWMDKVLVVYVDDDVQLRRLMARNGFTEEEALMRIRSQWPSAEKVKRADAVIDNNGNIEDTRRQLLDILHQWDLLDKGGSGHHHHHH

SEQ ID NO: 2013 - DNA, 633 bp, synthetic construct
  misc_feature 1..633: note = Variant of 3'O-kinase
  source 1..633: mol_type = other DNA
atggcggttaccattggtttaacaggagggatcgcagcgggcaaatcgactgtgagtgccatgatgcgtgaactgggtctgccggtcggtgatgctgacgaggcagcacgcgccgttatgaagccaggcgaagaagcgtatcgcgacattgtagctgaattcgggccgggcatccttcgtgcggatggcgagatcgatcgcgggaaactgcgtgctatccgcttttcggacgaacaacaacgtaaggtgctgaattcgattgtaggtcctgcagtcctgaagaagatgctcgcggagtgggaagctcatatcgggtcaggcgccaagacggttgtgctggatatcccgctgctgttcgaatccggattgcaatcgtggatggacaaagttctcgtggtgtacgttgatgatgatgttcagttacgccgccttatggcacgtaacgggtttactgaagaagaagctctgatgcgcattcgttcacagtggcccagtgcggagaaagttaaacgtgcagacgctgtcatcgacaataatggcaatattgaagatacccgccgccagctgctggacattttacaccagtgggatctgctggacaaaggtggctccggccaccatcatcaccatcac

SEQ ID NO: 2014 - protein, 211 aa, synthetic construct
  REGION 1..211: note = Variant of 3'O-kinase
MAVTIGLTGGIAAGKSTVSAMMRELGLPVGDADEAARAVMKPGEEAYRDIVAEFGPGILRADGEIDRGKLRAIRFSDEQQRKVLNSIVGPAVLKKMLAEWEAHIGSGAKTVVLDIPLLFESGLQSWMDKVLVVYVDDDVQLRRLMARNGFTEEEALMRIRSQWPSAEKVKRADAVIDNNGNIEDTRRQLLDILHQWDLLDKGGSGHHHHHH

SEQ ID NO: 2015 - DNA, 633 bp, synthetic construct
  misc_feature 1..633: note = Variant of 3'O-kinase
  source 1..633: mol_type = other DNA
atggcggttaccattggtttaacaggagggatcgcagcgggcaaatcgactgtgagtgccatgatggcggaactgggtctgccggtcatcgatgctgacgaggcagcacgcgccgttatgaagccaggcgaagaagcgtatcgcgacattgtagctgaattcgggccgggcatccttcgtgcggatggcgagatcgatcgcgggaaactgcgtgctatccgcttttcggacgaacaacaacgtaaggtgctgaattcgattgtaggtcctgcagtcctgaagaagatgctcgcggagtgggaagctcatatcgggtcaggcgccaagacggttgtgctggatatcccgctgctgttcgaatccggattgcaatcgtggatggacaaagttctcgtggtgtacgttgatgatgatgttcagttacgccgccttatggcacgtaacgggtttactgaagaagaagctctgatgcgcattcgttcacagtggcccagtgcggagaaagttaaacgtgcagacgctgtcatcgacaataatggcaatattgaagatacccgccgccagctgctggacattttacaccagtgggatctgctggacaaaggtggctccggccaccatcatcaccatcac

SEQ ID NO: 2016 - protein, 211 aa, synthetic construct
  REGION 1..211: note = Variant of 3'O-kinase
MAVTIGLTGGIAAGKSTVSAMMAELGLPVIDADEAARAVMKPGEEAYRDIVAEFGPGILRADGEIDRGKLRAIRFSDEQQRKVLNSIVGPAVLKKMLAEWEAHIGSGAKTVVLDIPLLFESGLQSWMDKVLVVYVDDDVQLRRLMARNGFTEEEALMRIRSQWPSAEKVKRADAVIDNNGNIEDTRRQLLDILHQWDLLDKGGSGHHHHHH

SEQ ID NO: 2017 - DNA, 633 bp, synthetic construct
  misc_feature 1..633: note = Variant of 3'O-kinase
  source 1..633: mol_type = other DNA
atggcggttaccattggtttaacaggagggatcgcagcgggcaaatcgactgtgagtcagatgatgcgtgaactgggtctgccggtcatcgatgctgacgaggcagcacgcgccgttatgaagccaggcgaagaagcgtatcgcgacattgtagctgaattcgggccgggcatccttcgtgcggatggcgagatcgatcgcgggaaactgcgtgctatccgcttttcggacgaacaacaacgtaaggtgctgaattcgattgtaggtcctgcagtcctgaagaagatgctcgcggagtgggaagctcatatcgggtcaggcgccaagacggttgtgctggatatcccgctgctgttcgaatccggattgcaatcgtggatggacaaagttctcgtggtgtacgttgatgatgatgttcagttacgccgccttatggcacgtaacgggtttactgaagaagaagctctgatgcgcattcgttcacagtggcccagtgcggagaaagttaaacgtgcagacgctgtcatcgacaataatggcaatattgaagatacccgccgccagctgctggacattttacaccagtgggatctgctggacaaaggtggctccggccaccatcatcaccatcac

SEQ ID NO: 2018 - protein, 211 aa, synthetic construct
  REGION 1..211: note = Variant of 3'O-kinase
MAVTIGLTGGIAAGKSTVSQMMRELGLPVIDADEAARAVMKPGEEAYRDIVAEFGPGILRADGEIDRGKLRAIRFSDEQQRKVLNSIVGPAVLKKMLAEWEAHIGSGAKTVVLDIPLLFESGLQSWMDKVLVVYVDDDVQLRRLMARNGFTEEEALMRIRSQWPSAEKVKRADAVIDNNGNIEDTRRQLLDILHQWDLLDKGGSGHHHHHH

SEQ ID NO: 2019 - DNA, 633 bp, synthetic construct
  misc_feature 1..633: note = Variant of 3'O-kinase
  source 1..633: mol_type = other DNA
atggcggttaccattggtttaacaggagggatcgcagcgggcaaatcgactgtgagtgccatgatgcgtgaactgggtctgccggtcatcgatgctgacgaggcagcacgcgccgttatgaagccaggcgaagaagcgtatcgcgacattgtagctgaattcgggccgggcatccttcgtgcggatggcgagatcgatcgcgggaaactgcgtgctatccgcttttcggacgaacaacaacgtaaggtgctgaattcgattgtaacgcctgcagtcctgaagaagatgctcgcggagtgggaagctcatatcgggtcaggcgccaagacggttgtgctggatatcccgctgctgttcgaatccggattgcaatcgtggatggacaaagttctcgtggtgtacgttgatgatgatgttcagttacgccgccttatggcacgtaacgggtttactgaagaagaagctctgatgcgcattcgttcacagtggcccagtgcggagaaagttaaacgtgcagacgctgtcatcgacaataatggcaatattgaagatacccgccgccagctgctggacattttacaccagtgggatctgctggacaaaggtggctccggccaccatcatcaccatcac

SEQ ID NO: 2020 - protein, 211 aa, synthetic construct
  REGION 1..211: note = Variant of 3'O-kinase
MAVTIGLTGGIAAGKSTVSAMMRELGLPVIDADEAARAVMKPGEEAYRDIVAEFGPGILRADGEIDRGKLRAIRFSDEQQRKVLNSIVTPAVLKKMLAEWEAHIGSGAKTVVLDIPLLFESGLQSWMDKVLVVYVDDDVQLRRLMARNGFTEEEALMRIRSQWPSAEKVKRADAVIDNNGNIEDTRRQLLDILHQWDLLDKGGSGHHHHHH

SEQ ID NO: 2021 - DNA, 633 bp, synthetic construct
  misc_feature 1..633: note = Variant of 3'O-kinase
  source 1..633: mol_type = other DNA
atggcggttaccattggtttaacaggagggatcgcagcgggcaaatcgactgcgagtgccatgatgcgtgaactgggtctgccggtcatcgatgctgacgaggcagcacgcgccgttatgaagccaggcgaagaagcgtatcgcgacattgtagctgaattcgggccgggcatccttcgtgcggatggcgagatcgatcgcgggaaactgcgtgctatccgcttttcggacgaacaacaacgtaaggtgctgaattcgattgtaggtcctgcagtcctgaagaagatgctcgcggagtgggaagctcatatcgggtcaggcgccaagacggttgtgctggatatcccgctgctgttcgaatccggattgcaatcgtggatggacaaagttctcgtggtgtacgttgatgatgatgttcagttacgccgccttatggcacgtaacgggtttactgaagaagaagctctgatgcgcattcgttcacagtggcccagtgcggagaaagttaaacgtgcagacgctgtcatcgacaataatggcaatattgaagatacccgccgccagctgctggacattttacaccagtgggatctgctggacaaaggtggctccggccaccatcatcaccatcac

SEQ ID NO: 2022 - protein, 211 aa, synthetic construct
  REGION 1..211: note = Variant of 3'O-kinase
MAVTIGLTGGIAAGKSTASAMMRELGLPVIDADEAARAVMKPGEEAYRDIVAEFGPGILRADGEIDRGKLRAIRFSDEQQRKVLNSIVGPAVLKKMLAEWEAHIGSGAKTVVLDIPLLFESGLQSWMDKVLVVYVDDDVQLRRLMARNGFTEEEALMRIRSQWPSAEKVKRADAVIDNNGNIEDTRRQLLDILHQWDLLDKGGSGHHHHHH

SEQ ID NO: 2023 - DNA, 633 bp, synthetic construct
  misc_feature 1..633: note = Variant of 3'O-kinase
  source 1..633: mol_type = other DNA
atggcggttaccattggtttaacaggagggatcgcagcgggcaaatcgactgtgagtgccatgatgcgtgaactgggtctgccgattatcgatgctgacgaggcagcacgcgccgttatgaagccaggcgaagaagcgtatcgcgacattgtagctgaattcgggccgggcatccttcgtgcggatggcgagatcgatcgcgggaaactgcgtgctatccgcttttcggacgaacaacaacgtaaggtgctgaattcgattgtaggtcctgcagtcctgaagaagatgctcgcggagtgggaagctcatatcgggtcaggcgccaagacggttgtgctggatatcccgctgctgttcgaatccggattgcaatcgtggatggacaaagttctcgtggtgtacgttgatgatgatgttcagttacgccgccttatggcacgtaacgggtttactgaagaagaagctctgatgcgcattcgttcacagtggcccagtgcggagaaagttaaacgtgcagacgctgtcatcgacaataatggcaatattgaagatacccgccgccagctgctggacattttacaccagtgggatctgctggacaaaggtggctccggccaccatcatcaccatcac

SEQ ID NO: 2024 - protein, 211 aa, synthetic construct
  REGION 1..211: note = Variant of 3'O-kinase
MAVTIGLTGGIAAGKSTVSAMMRELGLPIIDADEAARAVMKPGEEAYRDIVAEFGPGILRADGEIDRGKLRAIRFSDEQQRKVLNSIVGPAVLKKMLAEWEAHIGSGAKTVVLDIPLLFESGLQSWMDKVLVVYVDDDVQLRRLMARNGFTEEEALMRIRSQWPSAEKVKRADAVIDNNGNIEDTRRQLLDILHQWDLLDKGGSGHHHHHH

SEQ ID NO: 2025 - DNA, 633 bp, synthetic construct
  misc_feature 1..633: note = Variant of 3'O-kinase
  source 1..633: mol_type = other DNA
atggcggttaccattggtttaacaggagggatcgcagcgggcaaatcgactgtgagtgccatgatgcgtgaactgggtctgccggtcatcgatgctgacgaggcagcacgcgccgttatgaagccaggcgaagaagcgtatcgcgacattgtagctgaattcgggccgggcatccttcgtgcggatggcgagatcgatcgcgggaaactgcgtgctatccgcttttcggacgaacaacaacgtaaggtgctgaattcgattgtaggtcctgcagtcctgaagaagatgctcgcggagtgggaagctcatatcgggtcaggcgccaagacggttgtgctggatatcccgctgctgttcgaatccggattgcaatcgtggatggacaaagttctcgtggtgtacgttgatgatgatgttcagttatctcgccttatggcacgtaacgggtttactgaagaagaagctctgatgcgcattcgttcacagtggcccagtgcggagaaagttaaacgtgcagacgctgtcatcgacaataatggcaatattgaagatacccgccgccagctgctggacattttacaccagtgggatctgctggacaaaggtggctccggccaccatcatcaccatcac

SEQ ID NO: 2026 - protein, 211 aa, synthetic construct
  REGION 1..211: note = Variant of 3'O-kinase
MAVTIGLTGGIAAGKSTVSAMMRELGLPVIDADEAARAVMKPGEEAYRDIVAEFGPGILRADGEIDRGKLRAIRFSDEQQRKVLNSIVGPAVLKKMLAEWEAHIGSGAKTVVLDIPLLFESGLQSWMDKVLVVYVDDDVQLSRLMARNGFTEEEALMRIRSQWPSAEKVKRADAVIDNNGNIEDTRRQLLDILHQWDLLDKGGSGHHHHHH

SEQ ID NO: 2027 - DNA, 633 bp, synthetic construct
  misc_feature 1..633: note = Variant of 3'O-kinase
  source 1..633: mol_type = other DNA
atggcggttaccattggtttaacaggagggatcgcagcgggcaaatcgactgtgagtgccatgatgcgtgaactgggtctgccggtcatcgatgctgacgaggcagcagtggccgttatgaagccaggcgaagaagcgtatcgcgacattgtagctgaattcgggccgggcatccttcgtgcggatggcgagatcgatcgcgggaaactgcgtgctatccgcttttcggacgaacaacaacgtaaggtgctgaattcgattgtaggtcctgcagtcctgaagaagatgctcgcggagtgggaagctcatatcgggtcaggcgccaagacggttgtgctggatatcccgctgctgttcgaatccggattgcaatcgtggatggacaaagttctcgtggtgtacgttgatgatgatgttcagttacgccgccttatggcacgtaacgggtttactgaagaagaagctctgatgcgcattcgttcacagtggcccagtgcggagaaagttaaacgtgcagacgctgtcatcgacaataatggcaatattgaagatacccgccgccagctgctggacattttacaccagtgggatctgctggacaaaggtggctccggccaccatcatcaccatcac

SEQ ID NO: 2028 - protein, 211 aa, synthetic construct
  REGION 1..211: note = Variant of 3'O-kinase
MAVTIGLTGGIAAGKSTVSAMMRELGLPVIDADEAAVAVMKPGEEAYRDIVAEFGPGILRADGEIDRGKLRAIRFSDEQQRKVLNSIVGPAVLKKMLAEWEAHIGSGAKTVVLDIPLLFESGLQSWMDKVLVVYVDDDVQLRRLMARNGFTEEEALMRIRSQWPSAEKVKRADAVIDNNGNIEDTRRQLLDILHQWDLLDKGGSGHHHHHH

SEQ ID NO: 2029 - DNA, 633 bp, synthetic construct
  misc_feature 1..633: note = Variant of 3'O-kinase
  source 1..633: mol_type = other DNA
atggcggttaccattggtttaacaggagggatcgcagcgggcaaatcgactgtgagtgccatgatgcgtgaactgggtctgccggtcatcgatgctgacgaggcagcacgcgccgttcttaagccaggcgaagaagcgtatcgcgacattgtagctgaattcgggccgggcatccttcgtgcggatggcgagatcgatcgcgggaaactgcgtgctatccgcttttcggacgaacaacaacgtaaggtgctgaattcgattgtaggtcctgcagtcctgaagaagatgctcgcggagtgggaagctcatatcgggtcaggcgccaagacggttgtgctggatatcccgctgctgttcgaatccggattgcaatcgtggatggacaaagttctcgtggtgtacgttgatgatgatgttcagttacgccgccttatggcacgtaacgggtttactgaagaagaagctctgatgcgcattcgttcacagtggcccagtgcggagaaagttaaacgtgcagacgctgtcatcgacaataatggcaatattgaagatacccgccgccagctgctggacattttacaccagtgggatctgctggacaaaggtggctccggccaccatcatcaccatcac

SEQ ID NO: 2030 - protein, 211 aa, synthetic construct
  REGION 1..211: note = Variant of 3'O-kinase
MAVTIGLTGGIAAGKSTVSAMMRELGLPVIDADEAARAVLKPGEEAYRDIVAEFGPGILRADGEIDRGKLRAIRFSDEQQRKVLNSIVGPAVLKKMLAEWEAHIGSGAKTVVLDIPLLFESGLQSWMDKVLVVYVDDDVQLRRLMARNGFTEEEALMRIRSQWPSAEKVKRADAVIDNNGNIEDTRRQLLDILHQWDLLDKGGSGHHHHHH

SEQ ID NO: 2031 - DNA, 633 bp, synthetic construct
  misc_feature 1..633: note = Variant of 3'O-kinase
  source 1..633: mol_type = other DNA
atggcggttaccattggtttaacaggagggatcgcagcgggcaaatcgactgtgagtgccatgatgcgtgaactgggtctgccggtcatcgatgctgacgaggcagcacgcgccgttatgaagccaggcgaagaagcgtatcgcgacattgtagctgaattcgggccgggcatccttcgtgcggatggcgagatcgatcgcgggaaactgcgtgctatccgcttttcggacgaacaacaacgtaaggtgctgaattcgattgtaggtcctgcagtcctgaagaagatgctcgcggagtgggaagctcatatcgggtcaggcgccaagacggttgtgctggatatcccgctgctgttcgaatccggattgcaatcgtggatggacaaagttctcgtggtgtacgttgatgatgatgttcagttacgccgccttatgcagcgtaacgggtttactgaagaagaagctctgatgcgcattcgttcacagtggcccagtgcggagaaagttaaacgtgcagacgctgtcatcgacaataatggcaatattgaagatacccgccgccagctgctggacattttacaccagtgggatctgctggacaaaggtggctccggccaccatcatcaccatcac

SEQ ID NO: 2032 - protein, 211 aa, synthetic construct
  REGION 1..211: note = Variant of 3'O-kinase
MAVTIGLTGGIAAGKSTVSAMMRELGLPVIDADEAARAVMKPGEEAYRDIVAEFGPGILRADGEIDRGKLRAIRFSDEQQRKVLNSIVGPAVLKKMLAEWEAHIGSGAKTVVLDIPLLFESGLQSWMDKVLVVYVDDDVQLRRLMQRNGFTEEEALMRIRSQWPSAEKVKRADAVIDNNGNIEDTRRQLLDILHQWDLLDKGGSGHHHHHH

SEQ ID NO: 2033 - DNA, 633 bp, synthetic construct
  misc_feature 1..633: note = Variant of 3'O-kinase
  source 1..633: mol_type = other DNA
atggcggttaccattggtttaacaggagggatcgcagcgggcaaatcgactgtgagtgccatgatgcgtgaactgggtctgccggtcatcgatgctgacgaggcagcacgcgccgttatgaagccaggcgaagaagcgtatcgcgacattgtagctgaattcgggccgggcatccttcgtgcggatggcgagatcgatcgcgggaaactgcgtgctatccgcttttcggacgaacaacaacgtaaggtgctgaattcgattgtaggtcctgcagtcctgaagaagatgctcgcggagtgggaagctcatatcgggtcaggcgccaagacggttgtgctggatatcccgctgctgttcgaatccggattgcaatcgtggatggacaaagttctcgtggtgtacgttgatgatgatgttcagttagcgcgccttatggcacgtaacgggtttactgaagaagaagctctgatgcgcattcgttcacagtggcccagtgcggagaaagttaaacgtgcagacgctgtcatcgacaataatggcaatattgaagatacccgccgccagctgctggacattttacaccagtgggatctgctggacaaaggtggctccggccaccatcatcaccatcac

SEQ ID NO: 2034 - protein, 211 aa, synthetic construct
  REGION 1..211: note = Variant of 3'O-kinase
MAVTIGLTGGIAAGKSTVSAMMRELGLPVIDADEAARAVMKPGEEAYRDIVAEFGPGILRADGEIDRGKLRAIRFSDEQQRKVLNSIVGPAVLKKMLAEWEAHIGSGAKTVVLDIPLLFESGLQSWMDKVLVVYVDDDVQLARLMARNGFTEEEALMRIRSQWPSAEKVKRADAVIDNNGNIEDTRRQLLDILHQWDLLDKGGSGHHHHHH

SEQ ID NO: 2035 - DNA, 633 bp, synthetic construct
  misc_feature 1..633: note = Variant of 3'O-kinase
  source 1..633: mol_type = other DNA
atggcggttaccattggtttaacaggagggatcgcagcgggcaaatcgactgtgagtgccatgatgcgtgaactgggtctgccggtcatcgatgctgacgaggcagcacgcattgttatgaagccaggcgaagaagcgtatcgcgacattgtagctgaattcgggccgggcatccttcgtgcggatggcgagatcgatcgcgggaaactgcgtgctatccgcttttcggacgaacaacaacgtaaggtgctgaattcgattgtaggtcctgcagtcctgaagaagatgctcgcggagtgggaagctcatatcgggtcaggcgccaagacggttgtgctggatatcccgctgctgttcgaatccggattgcaatcgtggatggacaaagttctcgtggtgtacgttgatgatgatgttcagttacgccgccttatggcacgtaacgggtttactgaagaagaagctctgatgcgcattcgttcacagtggcccagtgcggagaaagttaaacgtgcagacgctgtcatcgacaataatggcaatattgaagatacccgccgccagctgctggacattttacaccagtgggatctgctggacaaaggtggctccggccaccatcatcaccatcac

SEQ ID NO: 2036 - protein, 211 aa, synthetic construct
  REGION 1..211: note = Variant of 3'O-kinase
MAVTIGLTGGIAAGKSTVSAMMRELGLPVIDADEAARIVMKPGEEAYRDIVAEFGPGILRADGEIDRGKLRAIRFSDEQQRKVLNSIVGPAVLKKMLAEWEAHIGSGAKTVVLDIPLLFESGLQSWMDKVLVVYVDDDVQLRRLMARNGFTEEEALMRIRSQWPSAEKVKRADAVIDNNGNIEDTRRQLLDILHQWDLLDKGGSGHHHHHH

SEQ ID NO: 2037 - DNA, 633 bp, synthetic construct
  misc_feature 1..633: note = Variant of 3'O-kinase
  source 1..633: mol_type = other DNA
atggcggttaccattggtttaacaggagggatcgcagcgggcaaatcgactgtgagtgccatgatgcgtgaactgggtctgccggtcatcgatgctgacgaggcagcacgcgccgttatgaagccaggcgaagaagcgtatcgcgacattgtagctgaattcgggccgggcatccttcgtgcggatggcgagatcgatcgcgggaaactgcgtgctatccgcttttcggacgaacaacaacgtaaggtgctgaattcgattgtaggtcctgcagtcctgaagaagatgctcgcggagtgggaagctcatatcgggtcaggcgccaagacggttgtgctggatatcccgctgctgttcgaatccggattgcaatcgtggatggacaaagttctcgtgaggtacgttgatgatgatgttcagttacgccgccttatggcacgtaacgggtttactgaagaagaagctctgatgcgcattcgttcacagtggcccagtgcggagaaagttaaacgtgcagacgctgtcatcgacaataatggcaatattgaagatacccgccgccagctgctggacattttacaccagtgggatctgctggacaaaggtggctccggccaccatcatcaccatcac

SEQ ID NO: 2038 - protein, 211 aa, synthetic construct
  REGION 1..211: note = Variant of 3'O-kinase
MAVTIGLTGGIAAGKSTVSAMMRELGLPVIDADEAARAVMKPGEEAYRDIVAEFGPGILRADGEIDRGKLRAIRFSDEQQRKVLNSIVGPAVLKKMLAEWEAHIGSGAKTVVLDIPLLFESGLQSWMDKVLVRYVDDDVQLRRLMARNGFTEEEALMRIRSQWPSAEKVKRADAVIDNNGNIEDTRRQLLDILHQWDLLDKGGSGHHHHHH

SEQ ID NO: 2039 - DNA, 633 bp, synthetic construct
  misc_feature 1..633: note = Variant of 3'O-kinase
  source 1..633: mol_type = other DNA
atggcggttaccattggtttacggggagggatcgcagcgggcaaatcgactgtgagtgccatgatgcgtgaactgggtctgccggtcatcgatgctgacgaggcagcacgcgccgttatgaagccaggcgaagaagcgtatcgcgacattgtagctgaattcgggccgggcatccttcgtgcggatggcgagatcgatcgcgggaaactgcgtgctatccgcttttcggacgaacaacaacgtaaggtgctgaattcgattgtaggtcctgcagtcctgaagaagatgctcgcggagtgggaagctcatatcgggtcaggcgccaagacggttgtgctggatatcccgctgctgttcgaatccggattgcaatcgtggatggacaaagttctcgtggtgtacgttgatgatgatgttcagttacgccgccttatggcacgtaacgggtttactgaagaagaagctctgatgcgcattcgttcacagtggcccagtgcggagaaagttaaacgtgcagacgctgtcatcgacaataatggcaatattgaagatacccgccgccagctgctggacattttacaccagtgggatctgctggacaaaggtggctccggccaccatcatcaccatcac

SEQ ID NO: 2040 - protein, 211 aa, synthetic construct
  REGION 1..211: note = Variant of 3'O-kinase
MAVTIGLRGGIAAGKSTVSAMMRELGLPVIDADEAARAVMKPGEEAYRDIVAEFGPGILRADGEIDRGKLRAIRFSDEQQRKVLNSIVGPAVLKKMLAEWEAHIGSGAKTVVLDIPLLFESGLQSWMDKVLVVYVDDDVQLRRLMARNGFTEEEALMRIRSQWPSAEKVKRADAVIDNNGNIEDTRRQLLDILHQWDLLDKGGSGHHHHHH

SEQ ID NO: 2041 - DNA, 633 bp, synthetic construct
  misc_feature 1..633: note = Variant of 3'O-kinase
  source 1..633: mol_type = other DNA
atggcggttaccattggtttaacaggagggatcgcagcgggcaaatcgactgtgagtgccatgatgcgtgaactgggtctgccggtcatcgatgctgacgaggcagcacgcgccgttatgaagccaggcgaagaagcgtatcgcgacattgtagctgaattcgggccgggcatccttcgtgcggatggcgagatcgatcgcgggaaactgcgtgctatccgcttttcggacgaacaacaacgtaaggtgctgaattcgatttggggtcctgcagtcctgaagaagatgctcgcggagtgggaagctcatatcgggtcaggcgccaagacggttgtgctggatatcccgctgctgttcgaatccggattgcaatcgtggatggacaaagttctcgtggtgtacgttgatgatgatgttcagttacgccgccttatggcacgtaacgggtttactgaagaagaagctctgatgcgcattcgttcacagtggcccagtgcggagaaagttaaacgtgcagacgctgtcatcgacaataatggcaatattgaagatacccgccgccagctgctggacattttacaccagtgggatctgctggacaaaggtggctccggccaccatcatcaccatcac

SEQ ID NO: 2042 - protein, 211 aa, synthetic construct
  REGION 1..211: note = Variant of 3'O-kinase
MAVTIGLTGGIAAGKSTVSAMMRELGLPVIDADEAARAVMKPGEEAYRDIVAEFGPGILRADGEIDRGKLRAIRFSDEQQRKVLNSIWGPAVLKKMLAEWEAHIGSGAKTVVLDIPLLFESGLQSWMDKVLVVYVDDDVQLRRLMARNGFTEEEALMRIRSQWPSAEKVKRADAVIDNNGNIEDTRRQLLDILHQWDLLDKGGSGHHHHHH

SEQ ID NO: 2043 - DNA, 633 bp, synthetic construct
  misc_feature 1..633: note = Variant of 3'O-kinase
  source 1..633: mol_type = other DNA
atggcggttaccattggtttaacaggagggatcgcagcgggcaaatcgactgtgagtgccatgatgcgtgaactgggtctgccggtcatcgatgctgacgaggcagcacgcgccgttatgaagccaggcgaagaagcgtatcgcgacattgtagctgaattcgggccgggcatccttcgtgcggatggcgagatcgatcgcgggaaactgcgtgctatccgcttttcggacgaacaacaacgtaaggtgctgaattcgattgtaggtcctgcagtcctgaagaagatgctcgcggagtgggaagctcatatcgggtcaggcgccaagacggttgtgctggatatcccgctgctgttcgaatccggattgcaatcgtggatggacaaagttctcgtggtgtacgttgatgatgatgttcagttacgccgccttatggcacgtaacgggtttactgaagaagaacctctgatgcgcattcgttcacagtggcccagtgcggagaaagttaaacgtgcagacgctgtcatcgacaataatggcaatattgaagatacccgccgccagctgctggacattttacaccagtgggatctgctggacaaaggtggctccggccaccatcatcaccatcac

SEQ ID NO: 2044 - protein, 211 aa, synthetic construct
  REGION 1..211: note = Variant of 3'O-kinase
MAVTIGLTGGIAAGKSTVSAMMRELGLPVIDADEAARAVMKPGEEAYRDIVAEFGPGILRADGEIDRGKLRAIRFSDEQQRKVLNSIVGPAVLKKMLAEWEAHIGSGAKTVVLDIPLLFESGLQSWMDKVLVVYVDDDVQLRRLMARNGFTEEEPLMRIRSQWPSAEKVKRADAVIDNNGNIEDTRRQLLDILHQWDLLDKGGSGHHHHHH

SEQ ID NO: 2045 - DNA, 633 bp, synthetic construct
  misc_feature 1..633: note = Variant of 3'O-kinase
  source 1..633: mol_type = other DNA
atggcggttaccattggtttaacaggagggatcgcagcgggcaaatcgactgtgagtgccatgatgcgtgaactgggtctgccggtcatcgatgctgacgaggcagcacgcgccgttatgaagccaggcgaagaagcgtatcgcgacattgtagctgaattcgggccgggcatccttcgtgcggatggcgagatcgatcgcgggaaactgcgtgctatccgcttttcggacgaacaacaacgtaaggtgctgaattcgattgtaggtcctgcagtcctgaagaagatgctcgcggagtgggaagctcatatcgggtcaggcgccaagacggttgtgagggatatcccgctgctgttcgaatccggattgcaatcgtggatggacaaagttctcgtggtgtacgttgatgatgatgttcagttacgccgccttatggcacgtaacgggtttactgaagaagaagctctgatgcgcattcgttcacagtggcccagtgcggagaaagttaaacgtgcagacgctgtcatcgacaataatggcaatattgaagatacccgccgccagctgctggacattttacaccagtgggatctgctggacaaaggtggctccggccaccatcatcaccatcac

SEQ ID NO: 2046 - protein, 211 aa, synthetic construct
  REGION 1..211: note = Variant of 3'O-kinase
MAVTIGLTGGIAAGKSTVSAMMRELGLPVIDADEAARAVMKPGEEAYRDIVAEFGPGILRADGEIDRGKLRAIRFSDEQQRKVLNSIVGPAVLKKMLAEWEAHIGSGAKTVVRDIPLLFESGLQSWMDKVLVVYVDDDVQLRRLMARNGFTEEEALMRIRSQWPSAEKVKRADAVIDNNGNIEDTRRQLLDILHQWDLLDKGGSGHHHHHH

SEQ ID NO: 2047 - DNA, 633 bp, synthetic construct
  misc_feature 1..633: note = Variant of 3'O-kinase
  source 1..633: mol_type = other DNA
atggcggttaccattggtttaacaggagggatcgcagcgggcaaatcgactgtgagtgccatgatgcgtgaactgggtctgccggtcatcgatgctgacgaggcagcacgcgccgttatgaagccaggcgaagaagcgtatcgcgacattgtagctgaattcgggccgggcatccttcgtgcggatggcgagatcgatcgcgggaaactgcgtgctatccgcttttcggacgaacaacaacgtaaggtgctgaattcgattgtaggtcctgcagtcctgaagaagatgctcgcggagtgggaagctcatatcgggtcaggcgccaagacggttgtgctggatatcccgctgctgttcgaatccggattgcaatcgtggatggacaaagttctcgtggtgtacgttgatgatgatgttcagttacgccgccttatggcacgtaacgggtttactgaagaagaagctctgatgcgcattcgtgtgcagtggcccagtgcggagaaagttaaacgtgcagacgctgtcatcgacaataatggcaatattgaagatacccgccgccagctgctggacattttacaccagtgggatctgctggacaaaggtggctccggccaccatcatcaccatcac

SEQ ID NO: 2048 - protein, 211 aa, synthetic construct
  REGION 1..211: note = Variant of 3'O-kinase
MAVTIGLTGGIAAGKSTVSAMMRELGLPVIDADEAARAVMKPGEEAYRDIVAEFGPGILRADGEIDRGKLRAIRFSDEQQRKVLNSIVGPAVLKKMLAEWEAHIGSGAKTVVLDIPLLFESGLQSWMDKVLVVYVDDDVQLRRLMARNGFTEEEALMRIRVQWPSAEKVKRADAVIDNNGNIEDTRRQLLDILHQWDLLDKGGSGHHHHHH

SEQ ID NO: 2049 - DNA, 633 bp, synthetic construct
  misc_feature 1..633: note = Variant of 3'O-kinase
  source 1..633: mol_type = other DNA
atggcggttaccattggtttaacaggagggccggcagcgggcaaatcgactgtgagtgccatgatgcgtgaactgggtctgccggtcatcgatgctgacgaggcagcacgcgccgttatgaagccaggcgaagaagcgtatcgcgacattgtagctgaattcgggccgggcatccttcgtgcggatggcgagatcgatcgcgggaaactgcgtgctatccgcttttcggacgaacaacaacgtaaggtgctgaattcgattgtaggtcctgcagtcctgaagaagatgctcgcggagtgggaagctcatatcgggtcaggcgccaagacggttgtgctggatatcccgctgctgttcgaatccggattgcaatcgtggatggacaaagttctcgtggtgtacgttgatgatgatgttcagttacgccgccttatggcacgtaacgggtttactgaagaagaagctctgatgcgcattcgttcacagtggcccagtgcggagaaagttaaacgtgcagacgctgtcatcgacaataatggcaatattgaagatacccgccgccagctgctggacattttacaccagtgggatctgctggacaaaggtggctccggccaccatcatcaccatcac

SEQ ID NO: 2050 - protein, 211 aa, synthetic construct
  REGION 1..211: note = Variant of 3'O-kinase
MAVTIGLTGGPAAGKSTVSAMMRELGLPVIDADEAARAVMKPGEEAYRDIVAEFGPGILRADGEIDRGKLRAIRFSDEQQRKVLNSIVGPAVLKKMLAEWEAHIGSGAKTVVLDIPLLFESGLQSWMDKVLVVYVDDDVQLRRLMARNGFTEEEALMRIRSQWPSAEKVKRADAVIDNNGNIEDTRRQLLDILHQWDLLDKGGSGHHHHHH

SEQ ID NO: 2051 - DNA, 633 bp, synthetic construct
  misc_feature 1..633: note = Variant of 3'O-kinase
  source 1..633: mol_type = other DNA
atggcggttaccattggtttaacaggagggatcgcagcgggcaaatcgactgtgagtgccatgatgcgtgaactgggtctgccggtcatcgatgctgacgaggcagcacgcgccgttatgaagccaggcgaagaagcgtatcgcgacattgtagctgaattcgggccgggcatccttcgtgcggatggcgagatcgatcgcgggaaactgcgtgctatccgcttttcggacgaacaacaacgtaaggtgctgaattcgattgtaggtcctgcagtcctgaagaagatgctcgcggagtgggaagctcatatcgggtcaggcgccaagacggttgtgctggatatcccgctgctgttcgaatccggattgcaatcgtggatggacaaagttctcgtggtgtacgttgatgatgatgttcagttacgcgttcttatggcacgtaacgggtttactgaagaagaagctctgatgcgcattcgttcacagtggcccagtgcggagaaagttaaacgtgcagacgctgtcatcgacaataatggcaatattgaagatacccgccgccagctgctggacattttacaccagtgggatctgctggacaaaggtggctccggccaccatcatcaccatcac

SEQ ID NO: 2052 - protein, 211 aa, synthetic construct
  REGION 1..211: note = Variant of 3'O-kinase
MAVTIGLTGGIAAGKSTVSAMMRELGLPVIDADEAARAVMKPGEEAYRDIVAEFGPGILRADGEIDRGKLRAIRFSDEQQRKVLNSIVGPAVLKKMLAEWEAHIGSGAKTVVLDIPLLFESGLQSWMDKVLVVYVDDDVQLRVLMARNGFTEEEALMRIRSQWPSAEKVKRADAVIDNNGNIEDTRRQLLDILHQWDLLDKGGSGHHHHHH

SEQ ID NO: 2053 - DNA, 633 bp, synthetic construct
  misc_feature 1..633: note = Variant of 3'O-kinase
  source 1..633: mol_type = other DNA
atggcggttaccattggtttaacaggagggatcgcagcgggctattcgactgtgagtgccatgatgcgtgaactgggtctgccggtcatcgatgctgacgaggcagcacgcgccgttatgaagccaggcgaagaagcgtatcgcgacattgtagctgaattcgggccgggcatccttcgtgcggatggcgagatcgatcgcgggaaactgcgtgctatccgcttttcggacgaacaacaacgtaaggtgctgaattcgattgtaggtcctgcagtcctgaagaagatgctcgcggagtgggaagctcatatcgggtcaggcgccaagacggttgtgctggatatcccgctgctgttcgaatccggattgcaatcgtggatggacaaagttctcgtggtgtacgttgatgatgatgttcagttacgccgccttatggcacgtaacgggtttactgaagaagaagctctgatgcgcattcgttcacagtggcccagtgcggagaaagttaaacgtgcagacgctgtcatcgacaataatggcaatattgaagatacccgccgccagctgctggacattttacaccagtgggatctgctggacaaaggtggctccggccaccatcatcaccatcac

SEQ ID NO: 2054 - protein, 211 aa, synthetic construct
  REGION 1..211: note = Variant of 3'O-kinase
MAVTIGLTGGIAAGYSTVSAMMRELGLPVIDADEAARAVMKPGEEAYRDIVAEFGPGILRADGEIDRGKLRAIRFSDEQQRKVLNSIVGPAVLKKMLAEWEAHIGSGAKTVVLDIPLLFESGLQSWMDKVLVVYVDDDVQLRRLMARNGFTEEEALMRIRSQWPSAEKVKRADAVIDNNGNIEDTRRQLLDILHQWDLLDKGGSGHHHHHH

SEQ ID NO: 2055 - DNA, 633 bp, synthetic construct
  misc_feature 1..633: note = Variant of 3'O-kinase
  source 1..633: mol_type = other DNA
atggcggttaccattggtttaacaggagggatcgcagcgggcaaatcgactgtgagtgccatgatgcgtgaactgggtctgccggtcatcgatgctgacgaggcagcacgcgccgttatgaaaccaggcgaagaagcgtatcgcgacattgtagctgaattcgggccgggcatccttcgtgcggatggccgtatcgatcgcgggaaactgcgtgccatccgcttttcggacgaacaacaacgtaaggtgctgaattcgattgtaggtcctgcagtcctgaagaagatgctcgcggagtgggaagctcatatcgggtcaggcgccaagacggttgtgctggatatcccgctgctgttcgaatccggattgcaatcgtggatggacaaagttctcgtggtgtacgttgatgatgatgttcagttacgccgccttatggcacgtaacgggctgactgaagaagaagctctgatgcgcattcgctcgcagtggcccagtgcggagaaagttaaacgtgcagacgctgtcatcgacaataatggcaccattgaagataccgtgcgccagctgctggacattttacaccagtgggatctgctggacaaaggtggctccggccaccatcatcaccatcac

SEQ ID NO: 2056 - protein, 211 aa, synthetic construct
  REGION 1..211: note = Variant of 3'O-kinase
MAVTIGLTGGIAAGKSTVSAMMRELGLPVIDADEAARAVMKPGEEAYRDIVAEFGPGILRADGRIDRGKLRAIRFSDEQQRKVLNSIVGPAVLKKMLAEWEAHIGSGAKTVVLDIPLLFESGLQSWMDKVLVVYVDDDVQLRRLMARNGLTEEEALMRIRSQWPSAEKVKRADAVIDNNGTIEDTVRQLLDILHQWDLLDKGGSGHHHHHH

SEQ ID NO: 2057 - DNA, 633 bp, synthetic construct
  misc_feature 1..633: note = Variant of 3'O-kinase
  source 1..633: mol_type = other DNA
atggcggttaccattggtttaacaggagggatcgcagcgggcaaatcgactgtgagtgccatgatgcgtgaactgggtctgccggtcatcgatgctgacgaggcagcacgcgccgttatgaaaccaggcgaagaagcgtatcgtgacattgtagctgaattcgggccgggcatccttcgtgcggatggccgtatcgatcgcgggaaactgcgtgccatccgcttttcggacgaacaacaacgtaaggtgctgaattcgattgtaggtcctgcagtcctgaagaagatgctcgcggagtgggaagctcatatcgggtcaggcgccaagacggttgtgctggatatcccgctgctgttcgaatccggattgcaatcgtggatggacaaagttctcgtggtgtacgttgatgatgatgttcagttacgccgccttatggcacgtaacgggctgactgaagaagaagctctgatgcgcattcgctcgcagtggccccaggcggagaaagttaaacgtgcagacgctgtcatcgacaataatggcaccattgaagatacccgccgccagctgctggacattttacaccagtgggatctgctggacaaaggtggctccggccaccatcatcaccatcac

SEQ ID NO: 2058 - protein, 211 aa, synthetic construct
  REGION 1..211: note = Variant of 3'O-kinase
MAVTIGLTGGIAAGKSTVSAMMRELGLPVIDADEAARAVMKPGEEAYRDIVAEFGPGILRADGRIDRGKLRAIRFSDEQQRKVLNSIVGPAVLKKMLAEWEAHIGSGAKTVVLDIPLLFESGLQSWMDKVLVVYVDDDVQLRRLMARNGLTEEEALMRIRSQWPQAEKVKRADAVIDNNGTIEDTRRQLLDILHQWDLLDKGGSGHHHHHH

SEQ ID NO: 2059 - DNA, 633 bp, synthetic construct
  misc_feature 1..633: note = Variant of 3'O-kinase
  source 1..633: mol_type = other DNA
atggcggttaccattggtttaacaggagggatcgcagcgggcaaatcgactgtgagtgccatgatgcgtgaactgggtctgccggtcatcgatgctgacgaggcagcacgcgccgttatgaaaccaggcgaagaagcgtatcgcgacattgtagctgaattcgggccgggcatccttgtcgcggatggccgtatcgatcgcgggaaactgcgtgccatccgcttttcggacgaacaacaacgtaaggtgctgaattcgattgtaggtcctgcagtcctgaagaagatgctcgcggagtgggaagctcatatcgggtcaggcgccaagacggttgtgctggatatcccgctgctgttcgaatccggattgcaatcgtggatggacaaagttctcgtggtgtacgttgatgatgatgttcagttacgccgccttatggcacgtaacgggctgactgaagaagaagctctgatgcgcattcgctcgcagtggcccagtgcggagaaagttaaacgtgcagacgctgtcatcgacaataatggcaccattgaagatacccgccgccagctgctggacattgtgcaccagtgggatctgctggacaaaggtggctccggccaccatcatcaccatcac

SEQ ID NO: 2060 - protein, 211 aa, synthetic construct
  REGION 1..211: note = Variant of 3'O-kinase
MAVTIGLTGGIAAGKSTVSAMMRELGLPVIDADEAARAVMKPGEEAYRDIVAEFGPGILVADGRIDRGKLRAIRFSDEQQRKVLNSIVGPAVLKKMLAEWEAHIGSGAKTVVLDIPLLFESGLQSWMDKVLVVYVDDDVQLRRLMARNGLTEEEALMRIRSQWPSAEKVKRADAVIDNNGTIEDTRRQLLDIVHQWDLLDKGGSGHHHHHH

SEQ ID NO: 2061 - DNA, 633 bp, synthetic construct
  misc_feature 1..633: note = Variant of 3'O-kinase
  source 1..633: mol_type = other DNA
atggcggttaccattggtttaacaggagggatcgcagcgggcaaatcgactgtgagtgccatgatgcgtgaactgggtctgccggtcatcgatgctgacgaggcagcacgcgccgttatgaaaccaggcgaagaagcgtatcgcgacattgtagctgaattcgggctgggcatccttcgcgcggatggccgtatcgatcgcgggaaactgcgtgccatccgctttgatgacgaacaaacccgtaaggtgctgaattcgattgtaggtcctgcagtcctgaagaagatgctcgcggagtgggaagctcatatcgggtcaggcgccaagacggttgtgctggatatcccgctgctgttcgaatccggattgcaatcgtggatggacaaagttctcgtggtgtacgttgatgatgatgttcagttacgccgccttatggcacgtaacgggctgactgaagaagaagctctgatgcgcattcgctcgcagtggcccagtgcggagaaagttacgcgtgcagacgctgtcatcgacaataatggcaccattgaagatacccgccgccagctgctggacattttacaccagtgggatctgctggacaaaggtggctccggccaccatcatcaccatcac

SEQ ID NO: 2062 - protein, 211 aa, synthetic construct
  REGION 1..211: note = Variant of 3'O-kinase
MAVTIGLTGGIAAGKSTVSAMMRELGLPVIDADEAARAVMKPGEEAYRDIVAEFGLGILRADGRIDRGKLRAIRFDDEQTRKVLNSIVGPAVLKKMLAEWEAHIGSGAKTVVLDIPLLFESGLQSWMDKVLVVYVDDDVQLRRLMARNGLTEEEALMRIRSQWPSAEKVTRADAVIDNNGTIEDTRRQLLDILHQWDLLDKGGSGHHHHHH

SEQ ID NO: 2063 - DNA, 633 bp, synthetic construct
  misc_feature 1..633: note = Variant of 3'O-kinase
  source 1..633: mol_type = other DNA
atggcggttaccattggtttaacaggagggatcgcagcgggcaaatcgactgtgagtgccatgatgcgtgaactgggtctgccggtcatcgatgctgacgaggcagcacgcgccgttatgaaaccaggcgaagaagcgtatcgtgacattgtagctaaattcgggctgggcatccttgtcgcggatggccgtatcgatcgcgggaaactgcgtgccatccgctttggtgacgaacaacagcgtaaggtgctgaattcgattgtaggtcctgcagtcctgaagaagatgctcgcggagtgggaagctcatatcgggtcaggcgccaagacggttgtgctggatatcccgctgctgttcgaatccggattgcaatcgtggatggacaaagttctcgtggtgtacgttgatgatgatgttcagttacgccgccttatggcacgtaacgggctgactgaagaagaagctctgatgcgcattcgctcgcagtggcccagtgcggagaaagttaaacgtgcagacgctgtcatcgacaataatggcaccattgaagatacccgccgccagctgctggacattctgcaccagtgggatctgctggacaaaggtggctccggccaccatcatcaccatcac

SEQ ID NO: 2064 - protein, 211 aa, synthetic construct
  REGION 1..211: note = Variant of 3'O-kinase
MAVTIGLTGGIAAGKSTVSAMMRELGLPVIDADEAARAVMKPGEEAYRDIVAKFGLGILVADGRIDRGKLRAIRFGDEQQRKVLNSIVGPAVLKKMLAEWEAHIGSGAKTVVLDIPLLFESGLQSWMDKVLVVYVDDDVQLRRLMARNGLTEEEALMRIRSQWPSAEKVKRADAVIDNNGTIEDTRRQLLDILHQWDLLDKGGSGHHHHHH

SEQ ID NO: 2065 - DNA, 633 bp, synthetic construct
  misc_feature 1..633: note = Variant of 3'O-kinase
  source 1..633: mol_type = other DNA
atggcggttaccattggtttaacaggagggatcgcagcgggcaaatcgactgtgagtgccatgatgcgtgaactgggtctgccggtcatcgatgctgacgaggcagcacgcgccgttatgaaaccaggcgaagaagcgtatcgcgacattgtagctgaattcgggccgggcatccttcgtgcggatggccgtatcgatcgcgggaaactgcgtgccatccgctttggtgacgaacaaacccgtaaggtgctgaattcgattgtaggtcctgcagtcctgaagaagatgctcgcggagtgggaagctcatatcgggtcaggcgccaagacggttgtgctggatatcccgctgctgttcgaatccggattgcaatcgtggatggacaaagttctcgtggtgtacgttgatgatgatgttcagttacgccgccttatggcacgtaacgggctgactgaagaagaagctctgatgcgcattcgctcgcagtggcccagtgcggagaaagttaaacgtgcagacgctgtcatcgacaataatggcaccattgaagatacccgccgccagctgctggacattttacaccagtgggatctgctggacaaaggtggctccggccaccatcatcaccatcac

SEQ ID NO: 2066 - protein, 211 aa, synthetic construct
  REGION 1..211: note = Variant of 3'O-kinase
MAVTIGLTGGIAAGKSTVSAMMRELGLPVIDADEAARAVMKPGEEAYRDIVAEFGPGILRADGRIDRGKLRAIRFGDEQTRKVLNSIVGPAVLKKMLAEWEAHIGSGAKTVVLDIPLLFESGLQSWMDKVLVVYVDDDVQLRRLMARNGLTEEEALMRIRSQWPSAEKVKRADAVIDNNGTIEDTRRQLLDILHQWDLLDKGGSGHHHHHH

SEQ ID NO: 2067 - DNA, 633 bp, synthetic construct
  misc_feature 1..633: note = Variant of 3'O-kinase
  source 1..633: mol_type = other DNA
atggcggttaccattggtttaacaggagggatcgcagcgggcaaatcgactgtgagtgccatgatgcgtgaactgggtctgccggtcatcgatgctgacgaggcagcacgcgccgttatgaaaccaggcgaagaagcgtatcgtgacattgtagctgaattcgggctgggcatccttgtcgcggatggccgtatcgatcgcgggaaactgcgtgccatccgcttttcggacgaacaacaacgtaaggtgctgatgtcgattgtaggtcctgcagtcctgaagaagatgctcgcggagtgggaagctcatatcgggtcaggcgccaagacggttgtgctggatatcccgctgctgttcgaatccggattgcaatcgtggatggacaaagttctcgtggtgtacgttgatgatgatgttcagttacgccgccttatggcacgtaacgggctgactgaagaagaagctctgatgcgcattcgctcgcagtggcccagtgcggagaaagttaaacgtgcagacgctgtcatcgacaataatggcaccattgaagatacccgccgccagctgctggacattgtgcaccagtgggatctgctggacaaaggtggctccggccaccatcatcaccatcac

SEQ ID NO: 2068 - protein, 211 aa, synthetic construct
  REGION 1..211: note = Variant of 3'O-kinase
MAVTIGLTGGIAAGKSTVSAMMRELGLPVIDADEAARAVMKPGEEAYRDIVAEFGLGILVADGRIDRGKLRAIRFSDEQQRKVLMSIVGPAVLKKMLAEWEAHIGSGAKTVVLDIPLLFESGLQSWMDKVLVVYVDDDVQLRRLMARNGLTEEEALMRIRSQWPSAEKVKRADAVIDNNGTIEDTRRQLLDIVHQWDLLDKGGSGHHHHHH

SEQ ID NO: 2069 - DNA, 633 bp, synthetic construct
  misc_feature 1..633: note = Variant of 3'O-kinase
  source 1..633: mol_type = other DNA
atggcggttaccattggtttaacaggagggatcgcagcgggcaaatcgactgtgagtgccatgatgcgtgaactgggtctgccggtcatcgatgctgacgaggcagcacgcgccgttatgaaaccaggcgaagaagcgtatgaggacattgtagctaaattcgggccgggcatccttgtcgcggatggccgtatcgatcgcgggaaactgcgtgccatccgctttgatgacgaacaaacccgtaaggtgctgaattcgattgtaggtcctgcagttctgaagaagatgctcgcggagtgggaagctcatatcgggtcaggcgccaagacggttgtgctggatatcccgctgctgttcgaatccggattgcaatcgtggatggacaaagttctcgtggtgtacgttgatgatgatgttcagttacgccgccttatggcacgtaacgggctgactgaagaagaagctctgatgcgcattcgctcgcagtggcccagtgcggagaaagttaagcgtgcagacgctgtcatcgacaataatggcaccattgaagatacccgccgccagctgctggacattgtgcaccagtgggatctgctggacaaaggtggctccggccaccatcatcaccatcac

SEQ ID NO: 2070 - protein, 211 aa, synthetic construct
  REGION 1..211: note = Variant of 3'O-kinase
MAVTIGLTGGIAAGKSTVSAMMRELGLPVIDADEAARAVMKPGEEAYEDIVAKFGPGILVADGRIDRGKLRAIRFDDEQTRKVLNSIVGPAVLKKMLAEWEAHIGSGAKTVVLDIPLLFESGLQSWMDKVLVVYVDDDVQLRRLMARNGLTEEEALMRIRSQWPSAEKVKRADAVIDNNGTIEDTRRQLLDIVHQWDLLDKGGSGHHHHHH

SEQ ID NO: 2071 - DNA, 633 bp, synthetic construct
  misc_feature 1..633: note = Variant of 3'O-kinase
  source 1..633: mol_type = other DNA
atggcggttaccattggtttaacaggagggatcgcagcgggcaaatcgactgtgagtgccatgatgcgtgaactgggtctgccggtcatcgatgctgacgaggcagcacgcgccgttatgaaaccaggcgaagaagcgtatcgcgacattgtagctgaattcgggctgggcatccttgtcgcggatggccgtatcgatcgcgggaaactgcgtgccatccgcttttcggacgaacaacagcgtaaggtgctgaattcgattgtaggtcctgcagtcctgaagaagatgctcgcggagtgggaagctcatatcgggtcaggcgccaagacggttgtgctggatatcccgctgctgttcgaatccggattgcaatcgtggatggacaaagttctcgtggtgtacgttgatgatgatgttcagttacgccgccttatggcacgtaacgggctgactgaagaagaagctctgatgcgcattcgctcgcagtggcccagtgcggagaaagttaaacgtgcagacgctgtcatcgacaataatggcaccattgaagatacccgccgccagctgctggacattctgcaccagtgggatctgctggacaaaggtggctccggccaccatcatcaccatcac

SEQ ID NO: 2072 - protein, 211 aa, synthetic construct
  REGION 1..211: note = Variant of 3'O-kinase
MAVTIGLTGGIAAGKSTVSAMMRELGLPVIDADEAARAVMKPGEEAYRDIVAEFGLGILVADGRIDRGKLRAIRFSDEQQRKVLNSIVGPAVLKKMLAEWEAHIGSGAKTVVLDIPLLFESGLQSWMDKVLVVYVDDDVQLRRLMARNGLTEEEALMRIRSQWPSAEKVKRADAVIDNNGTIEDTRRQLLDILHQWDLLDKGGSGHHHHHH

SEQ ID NO: 2073 - DNA, 633 bp, synthetic construct
  misc_feature 1..633: note = Variant of 3'O-kinase
  source 1..633: mol_type = other DNA
atggcggttaccattggtttaacaggagggatcgcagcgggcaaatcgactgtgagtgccatgatgcgtgaactgggtctgccggtcatcgatgctgacgaggcagcacgcgccgttcgcaaaccaggcgaagaagcgtatcgcgacattgtagctgaattcgggccgggcatccttcgtgcggatggccgtatcgatcgcgggaaactgcgtgccatccgcttttcggacgaacaacaacgtaaggtgctgaattcgattgtaggtcctgcagctctgaagaagatgctcgcggagtgggaagctcatgtcgggtcaggcgccaagacggttgtgctggatatcccgctgctgttcgaatccggattgcaatcgtggatggacaaagttctcgtggtgtacgttgatgatgatgttcagttacgccgccttatggcacgtaacgggctgactgaagaagaagctctgatgcgcattcgctcgcagtggcccagtgcggagaaagttaaacgtgcagacgctgtcatcgacaataatggcaccattgaagatacccgccgccagctgctggacattttacaccagtgggatctgctggacaaaggtggctccggccaccatcatcaccatcac

SEQ ID NO: 2074 - protein, 211 aa, synthetic construct
  REGION 1..211: note = Variant of 3'O-kinase
MAVTIGLTGGIAAGKSTVSAMMRELGLPVIDADEAARAVRKPGEEAYRDIVAEFGPGILRADGRIDRGKLRAIRFSDEQQRKVLNSIVGPAALKKMLAEWEAHVGSGAKTVVLDIPLLFESGLQSWMDKVLVVYVDDDVQLRRLMARNGLTEEEALMRIRSQWPSAEKVKRADAVIDNNGTIEDTRRQLLDILHQWDLLDKGGSGHHHHHH

SEQ ID NO: 2075 - DNA, 633 bp, synthetic construct
  misc_feature 1..633: note = Variant of 3'O-kinase
  source 1..633: mol_type = other DNA
atggcggttaccattggtttaacaggagggatcgcagcgggcaaatcgactgtgagtgccatgatgcgtgaactgggtctgccggtcatcgatgctgacgaggcagcacgcgccgttatgaaaccaggcgaagaagcgtatcgcgacattgtagctgaattcgggctgggcatccttgtcgcggatggccgtatcgatcgcgggaaactgcgtgccatccgctttgatgacgtacaaacccgtaaggtgctgaattcgattgtaggtcctgcagtcctgaagaagatgctcgcggagtgggaagctcatatcgggtcaggcgccaagacggttgtgctggatatcccgctgctgttcgaatccggattgcaatcgtggatggacaaagttctcgtggtgtacgttgatgatgatgttcagttacgccgccttatggcacgtaacgggctgactgaagaagaagctctgatgcgcattcgctcgcagtggcccagtgcggagaaagttaaacgtgcagacgctgtcatcgacaataatggcaccattgaagatacccgccgccagctgctggacattctgcaccagtgggatctgctggacaaaggtggctccggccaccatcatcaccatcac

SEQ ID NO: 2076 - protein, 211 aa, synthetic construct
  REGION 1..211: note = Variant of 3'O-kinase
MAVTIGLTGGIAAGKSTVSAMMRELGLPVIDADEAARAVMKPGEEAYRDIVAEFGLGILVADGRIDRGKLRAIRFDDVQTRKVLNSIVGPAVLKKMLAEWEAHIGSGAKTVVLDIPLLFESGLQSWMDKVLVVYVDDDVQLRRLMARNGLTEEEALMRIRSQWPSAEKVKRADAVIDNNGTIEDTRRQLLDILHQWDLLDKGGSGHHHHHH

SEQ ID NO: 2077 - DNA, 633 bp, synthetic construct
  misc_feature 1..633: note = Variant of 3'O-kinase
  source 1..633: mol_type = other DNA
atggcggttaccattggtttaacaggagggatcgcagcgggcaaatcgactgtgagtgccatgatgcgtgaactgggtctgccggtcatcgatgctgacgaggcagcacgcgccgttatgaaaccaggcgaagaagcgtatcgcgacattgtagctgaattcgggccgggcatccttgctgaagatggccgtatcgatcgcgggaaactgcgtgccatccgcttttcggacgaacaacaacgtaaggtgctgaattcgattgtaggtcctgcagtcctgaagaagatgctcgcggagtgggaagctcatatcgggtcaggcgccaagacggttgtgctggatatcccgctgctgttcgaatccggattgcaatcgtggatggacaaagttctcgtggtgtacgttgatgatgatgttcagttacgccgccttatggcacgtaacgggctgactgaagaagaagctctgatgcgcattcgctcgcagtggcccagtgcggagaaagttaaacgtgcagacgctgtcatcgacaataatggcaccattgaagatacccgccgccagctgctggacattttacaccagtgggatctgctggacaaaggtggctccggccaccatcatcaccatcac

SEQ ID NO: 2078 - protein, 211 aa, synthetic construct
  REGION 1..211: note = Variant of 3'O-kinase
MAVTIGLTGGIAAGKSTVSAMMRELGLPVIDADEAARAVMKPGEEAYRDIVAEFGPGILAEDGRIDRGKLRAIRFSDEQQRKVLNSIVGPAVLKKMLAEWEAHIGSGAKTVVLDIPLLFESGLQSWMDKVLVVYVDDDVQLRRLMARNGLTEEEALMRIRSQWPSAEKVKRADAVIDNNGTIEDTRRQLLDILHQWDLLDKGGSGHHHHHH

SEQ ID NO: 2079 - DNA, 633 bp, synthetic construct
  misc_feature 1..633: note = Variant of 3'O-kinase
  source 1..633: mol_type = other DNA
atggcggttaccattggtttaacaggagggatcgcagctggcaaatcgactgtgagtgccatgatgcgtgaactgggtctgccagtcatcgatgctgacgaggcagcacgcgccgttatgaaaccaggcgaagaagcgtatcgcgatattgtagctgaattcgggccgggcatccttcgtgcggatggccgtatcgatcgcgggaaactgcgtgccatccgcttttcggacgaacaacaacgtaaggtgctgaattcgattgtaggtcctgcagtcctgaagaagatgctcgcggagtggctggctcatatcgggtcaggcgcctcgacggttgtgctggatatcccgctgctgttcgaatccggattgcaatcgtggatggacaaagttctcgtggtgtacgttgatgatgatgttcagttacgccgccttatggcacgtaacgggctgactgaagaagaagctctgatgcgcattcgctcgcagtggcccagtgcggagaaagttaaacgtgcagacgctgtcatcgacaataatggcaccattgaagatacccgccgccagctgctggacattttacaccagtgggatagcctggacaaaggtggctccggccaccatcatcaccatcac

SEQ ID NO: 2080 - protein, 211 aa, synthetic construct
  REGION 1..211: note = Variant of 3'O-kinase
MAVTIGLTGGIAAGKSTVSAMMRELGLPVIDADEAARAVMKPGEEAYRDIVAEFGPGILRADGRIDRGKLRAIRFSDEQQRKVLNSIVGPAVLKKMLAEWLAHIGSGASTVVLDIPLLFESGLQSWMDKVLVVYVDDDVQLRRLMARNGLTEEEALMRIRSQWPSAEKVKRADAVIDNNGTIEDTRRQLLDILHQWDSLDKGGSGHHHHHH

SEQ ID NO: 2081 - DNA, 633 bp, synthetic construct
  misc_feature 1..633: note = Variant of 3'O-kinase
  source 1..633: mol_type = other DNA
atggcggttaccattggtttaacaggagggatcgcagcgggcaaatcgactgtgagtgccatgatgcgtgaactgggttttccggtcatcgatgctgacgaggcagcacgcgccgttatgaaaccaggcgaagaagcgtatcgcgacattgtagctgaattcgggccgggcatccttcgtgcggatggccgtatcgatcgcgggaaactgcgtgccatccgcttttcggacgaacaacaacgtaaggtgctgaattcgattgtaggtcctgcagtcctgaagaagatgctcgcggagtgggaagctcatatcgggtcaggcgccaagacggttgtgctggatatcccgctgctgttcgaatccggattgcaatcgtggatggacaaagttctcgtggtgtacgttgatgatgatgttcagttacgccgccttatggcacgtaacgggctgactgaagaagaagctctgatgcgcattcgctcgcagtggcccagtgcggagaaagttaaacgtgcagacgctgtcatcgacaataatggcaccattgaagatacccgccgccagctgctggacattttacaccagtgggatctgctggacaaaggtggctccggccaccatcatcaccatcac

SEQ ID NO: 2082 - protein, 211 aa, synthetic construct
  REGION 1..211: note = Variant of 3'O-kinase
MAVTIGLTGGIAAGKSTVSAMMRELGFPVIDADEAARAVMKPGEEAYRDIVAEFGPGILRADGRIDRGKLRAIRFSDEQQRKVLNSIVGPAVLKKMLAEWEAHIGSGAKTVVLDIPLLFESGLQSWMDKVLVVYVDDDVQLRRLMARNGLTEEEALMRIRSQWPSAEKVKRADAVIDNNGTIEDTRRQLLDILHQWDLLDKGGSGHHHHHH

SEQ ID NO: 2083 - DNA, 633 bp, synthetic construct
  misc_feature 1..633: note = Variant of 3'O-kinase
  source 1..633: mol_type = other DNA
atggcggttaccattggtttaacaggagggatcgcagcgggcaaatcgactgtgagtgccatgatgcgtgaactgggttttccggtcatcgatgctgacgaggcagcacgcgccgttatgaaaccaggcgaagaagcgtatcgcggcattatcgctgaattcgggccgggcatccttcgtgcggatggccgtatcgatcgcgggaaactgcgtgccatccgcttttcggacgaacaacaacgtaaggtgctgaattcgattgtaggtcctgcagtcctgaagaagatgctcgcggagtgggaagctcatatcgggtcaggcgccaagacggttgtgctggatatcccgctgctgttcgaatccggattgcaaagttggatggacaaagttctcgtggtgtacgttgatgatgatgttcagttacgccgccttatggcacgtaacgggctgactgaagaagaagctctgatgcgcattcgctcgcagtggcccagtgcggagaaagttaaacgtgcagacgctgtcatcgacaataatggcaccattgaagatacccgccgccagctgctggacattttacaccagtgggatctgctggacaaaggtggctccggccaccatcatcaccatcac

SEQ ID NO: 2084 - protein, 211 aa, synthetic construct
  REGION 1..211: note = Variant of 3'O-kinase
MAVTIGLTGGIAAGKSTVSAMMRELGFPVIDADEAARAVMKPGEEAYRGIIAEFGPGILRADGRIDRGKLRAIRFSDEQQRKVLNSIVGPAVLKKMLAEWEAHIGSGAKTVVLDIPLLFESGLQSWMDKVLVVYVDDDVQLRRLMARNGLTEEEALMRIRSQWPSAEKVKRADAVIDNNGTIEDTRRQLLDILHQWDLLDKGGSGHHHHHH

SEQ ID NO: 2085 - DNA, 633 bp, synthetic construct
  misc_feature 1..633: note = Variant of 3'O-kinase
  source 1..633: mol_type = other DNA
atggcggttaccattggtttaacaggagggatcgcagcgggcaaatcgactgtgagtgccatgatgcgtgaactgggtctgccggtcatcgatgctgacgaggcagcacgcgccgttatgaaaccaggcgaagaagcgtatcgcgacattgtagctgaattcgggctgggcatccttcgcgcggatggccgtatcgatcgcgggaaactgcgtgccatccgcttttcggacgaacaacagcgtaaggtgctgatgtcgattgtaggtcctgcagtcctgaagaagatgctcgcggagtgggaagctcatgtcgggtcaggcgccaagacggttgtgctggatatcccgctgctgttcgaatccggattgcaatcgtggatggacaaagttctcgtggtgtacgttgatgatgatgttcagttacgccgccttatggcacgtaacgggctgactgaagaagaagctctgatgcgcattcgctcgcagtggcccagtgcggagaaagttaaacgtgcagacgctgtcatcgacaataatggcaccattgaagatacccgccgccagctgctggacattttacaccagtgggatctgctggacaaaggtggctccggccaccatcatcaccatcac

SEQ ID NO: 2086 - protein, 211 aa, synthetic construct
  REGION 1..211: note = Variant of 3'O-kinase
MAVTIGLTGGIAAGKSTVSAMMRELGLPVIDADEAARAVMKPGEEAYRDIVAEFGLGILRADGRIDRGKLRAIRFSDEQQRKVLMSIVGPAVLKKMLAEWEAHVGSGAKTVVLDIPLLFESGLQSWMDKVLVVYVDDDVQLRRLMARNGLTEEEALMRIRSQWPSAEKVKRADAVIDNNGTIEDTRRQLLDILHQWDLLDKGGSGHHHHHH

SEQ ID NO: 2087 - DNA, 633 bp, synthetic construct
  misc_feature 1..633: note = Variant of 3'O-kinase
  source 1..633: mol_type = other DNA
atggcggttaccattggtttaacaggagggatcgcagcgggcaaatcgactgtgagtgccatgatgcgtgaactgggtctgccggtcatcgatgctgacgaggcagcacgcgccgttatgaaaccaggcgaagaagcgtatgctgacattgtagctgaattcgggccgggcatccttcgtgcggatggccgtatcgatcgcgggaaactgcgtgccatccgcttttcggacgaacaacaacgtaaggtgctgaattcgattgtaggtcctgcagtcctgaagaagatgctcgcggagtgggaagctcatatcgggtcaggcgccaagacggttgtgctggatatcccgctgctgttcgaatccggattgcaatcgtggatggacaaagttctcgtggtgtacgttgatgatgatgttcagttacgccgccttatggcacgtaacgggctgactgaagaagaagctctgatgcgcattcgctcgcagtggcccagtgcggagaaagttaaacgtgcagacgctgtcatcgacaataatggcaccattgaagatacccgccgccagctgctggacattttacaccagtgggatctgctggacaaaggtggctccggccaccatcatcaccatcac

SEQ ID NO: 2088 - protein, 211 aa, synthetic construct
  REGION 1..211: note = Variant of 3'O-kinase
MAVTIGLTGGIAAGKSTVSAMMRELGLPVIDADEAARAVMKPGEEAYADIVAEFGPGILRADGRIDRGKLRAIRFSDEQQRKVLNSIVGPAVLKKMLAEWEAHIGSGAKTVVLDIPLLFESGLQSWMDKVLVVYVDDDVQLRRLMARNGLTEEEALMRIRSQWPSAEKVKRADAVIDNNGTIEDTRRQLLDILHQWDLLDKGGSGHHHHHH

SEQ ID NO: 2089 - DNA, 633 bp, synthetic construct
  misc_feature 1..633: note = Variant of 3'O-kinase
  source 1..633: mol_type = other DNA
atggcggttaccattggtttaacaggagggatcgcagctggcaaatcgactgtgagtgccatgatgcgtgaactgggtctgccggtcatcgatgctgacgaggcagcacgcgccgttcgcaaaccaggcgaagaagcgtatcgcgacattgtagctgaattcgggccgggcatccttcgtgcggatggccgtatcgatcgcgggaaactgcgtgccatccgcttttcggacgaacaacaacgtaaggtgctgaattcgattgtaggtcctgcagtcctgaagaagatgctcgcggagtgggaagctcatatcgggtcaggcgccaagacggttgtgctggatatcccgctgctgttcgaatccggattgcaatcgtggatggacaaagttctcgtggtgtacgttgatgatgatgttcagttacgccgccttatggcacgtaacgggctgactgaagaagaagctctgatgcgcattcgctcgcagtggcccagtgcggagaaagttaaacgtgcagacgctgtcatcgacaataatggcaccattgaagatacccgccgccagctgctggacattttacaccagtgggatctgctggacaaaggtggctccggccaccatcatcaccatcac

SEQ ID NO: 2090 - protein, 211 aa, synthetic construct
  REGION 1..211: note = Variant of 3'O-kinase
MAVTIGLTGGIAAGKSTVSAMMRELGLPVIDADEAARAVRKPGEEAYRDIVAEFGPGILRADGRIDRGKLRAIRFSDEQQRKVLNSIVGPAVLKKMLAEWEAHIGSGAKTVVLDIPLLFESGLQSWMDKVLVVYVDDDVQLRRLMARNGLTEEEALMRIRSQWPSAEKVKRADAVIDNNGTIEDTRRQLLDILHQWDLLDKGGSGHHHHHH

SEQ ID NO: 2091 - DNA, 633 bp, synthetic construct
  misc_feature 1..633: note = Variant of 3'O-kinase
  source 1..633: mol_type = other DNA
atggcggttaccattggtttaacaggagggatcgcagctggcaaatcgactgtgagtgccatgatgcgtgaactgggtctgccggtcatcgatgctgacgaggcagcacgcgccgttatgaaaccaggcgaagaagcgtatcgccagattgtagctgaattcgggccgggcatccttcgtgcggatggccgtatcgatcgcgggaaactgcgtgccatccgcttttcggacgaacaacaacgtaaggtgctgaattcgattgtaggtcctgcagtcctgaagaagatgctcgcggagtgggaagctcatatcgggtcaggcgccaagacggttgtgctggatatcccgctgctgttcgaatccggattgcaatcgtggatggacaaagttctcgtggtgtacgttgatgatgatgttcagttacgccgccttatggcacgtaacgggctgactgaagaagaagctctgatgcgcattcgctcgcagtggcccagtgcggagaaagttaaacgtgcagacgctgtcatcgacaataatggcaccattgaagatacccgccgccagctgctggacattttacaccagtgggatctgctggacaaaggtggctccggccaccatcatcaccatcac

SEQ ID NO: 2092 - protein, 211 aa, synthetic construct
  REGION 1..211: note = Variant of 3'O-kinase
MAVTIGLTGGIAAGKSTVSAMMRELGLPVIDADEAARAVMKPGEEAYRQIVAEFGPGILRADGRIDRGKLRAIRFSDEQQRKVLNSIVGPAVLKKMLAEWEAHIGSGAKTVVLDIPLLFESGLQSWMDKVLVVYVDDDVQLRRLMARNGLTEEEALMRIRSQWPSAEKVKRADAVIDNNGTIEDTRRQLLDILHQWDLLDKGGSGHHHHHH

SEQ ID NO: 2093 - DNA, 633 bp, synthetic construct
  misc_feature 1..633: note = Variant of 3'O-kinase
  source 1..633: mol_type = other DNA
atggcggttaccattggtttaacaggagggatcgcagcgggcaaatcgactgtgagtgccatgatgcgtgaactgggtctgccggtcatcgatgctgacgaggcagcacgcgccgttatgaaaccaggcgaagaagcgtatcgcgacattgtagctgaattcgggctgggcatccttcgcgcggatggccgtatcgatcgcgggaaactgcgtgccatccgcttttcggacgaacaacaacgtaaggtgctgaattcgattgtaggtcctgcagtcctgaagaagatgctcgcggagtgggaagctcatatcgggtcaggcgccaagacggttgtgctggatatcccgctgctgttcgaatccggattgcaatcgtggatggacaaagttctcgtggtgtacgttgatgatgatgttcagttacgccgccttatggcacgtaacgggctgactgaagaagaagctctgatgcgcattcgctcgcagtggcccagtgcggcgaaagttaagcgtgcagacgctgtcatcgacaataatggcaccattgaagatacccgccgccagctgctggacattgtgcaccagtgggatctgctggacaaaggtggctccggccaccatcatcaccatcac

SEQ ID NO: 2094 - protein, 211 aa, synthetic construct
  REGION 1..211: note = Variant of 3'O-kinase
MAVTIGLTGGIAAGKSTVSAMMRELGLPVIDADEAARAVMKPGEEAYRDIVAEFGLGILRADGRIDRGKLRAIRFSDEQQRKVLNSIVGPAVLKKMLAEWEAHIGSGAKTVVLDIPLLFESGLQSWMDKVLVVYVDDDVQLRRLMARNGLTEEEALMRIRSQWPSAAKVKRADAVIDNNGTIEDTRRQLLDIVHQWDLLDKGGSGHHHHHH

SEQ ID NO: 2095 - DNA, 633 bp, synthetic construct
  misc_feature 1..633: note = Variant of 3'O-kinase
  source 1..633: mol_type = other DNA
atggcggttaccattggtttaacaggagggatcgcagcgggcaaatcgactgtgagtgccatgatgcgtgaactgggtctgccggtcatcgatgctgacgaggcagcacgcgccgttatgaaaccaggcgaagaagcgtatgaggacattgtagctgaattcgggctgggcatccttgtcgcggatggccgtatcgatcgcgggaaactgcgtgccatccgctttgatgacgaacaacagcgtaaggtgctgaattcgattgtaggtcctgcagtcctgaagaagatgctcgcggagtgggaagctcatatcgggtcaggcgccaagacggttgtgctggatatcccgctgctgttcgaatccggattgcaatcgtggatggacaaagttctcgtggtgtacgttgatgatgatgttcagttacgccgccttatggcacgtaacgggctgactgaagaagaagctctgatgcgcattcgctcgcagtggcccagtgcggcgaaagttacgcgtgcagacgctgtcatcgacaataatggcaccattgaagatacccgccgccagctgctggacattgtgcaccagtgggatctgctggacaaaggtggctccggccaccatcatcaccatcac

SEQ ID NO: 2096 - protein, 211 aa, synthetic construct
  REGION 1..211: note = Variant of 3'O-kinase
MAVTIGLTGGIAAGKSTVSAMMRELGLPVIDADEAARAVMKPGEEAYEDIVAEFGLGILVADGRIDRGKLRAIRFDDEQQRKVLNSIVGPAVLKKMLAEWEAHIGSGAKTVVLDIPLLFESGLQSWMDKVLVVYVDDDVQLRRLMARNGLTEEEALMRIRSQWPSAAKVTRADAVIDNNGTIEDTRRQLLDIVHQWDLLDKGGSGHHHHHH

SEQ ID NO: 2097 - DNA, 633 bp, synthetic construct
  misc_feature 1..633: note = Variant of 3'O-kinase
  source 1..633: mol_type = other DNA
atggcggttaccattggtttaacaggagggatcgcagcgggcaaatcgactgtgagtgccatgatgcgtgaactgggtctgccggtcatcgatgctgacgaggcagcacgcgccgttatgaaaccaggcgaagaagcgtatcgcgacattgtagctgaattcgggctgggcatccttcgcgcggatggccgtatcgatcgcgggaaactgcgtgccatccgctttggtgacgaacaaacccgtaaggtgctgaattcgattgtaggtcctgcagtcctgaagaagatgctcgcggagtgggaagctcatatcgggtcaggcgccaagacggttgtgctggatatcccgctgctgttcgaatccggattgcaatcgtggatggacaaagttctcgtggtgtacgttgatgatgatgttcagttacgccgccttatggcacgtaacgggctgactgaagaagaagctctgatgcgcattcgctcgcagtggcccagtgcggagaaagttaagcgtgcagacgctgtcatcgacaataatggcaccattgaagatacccgccgccagctgctggacattgtgcaccagtgggatctgctggacaaaggtggctccggccaccatcatcaccatcac

SEQ ID NO: 2098 - protein, 211 aa, synthetic construct
  REGION 1..211: note = Variant of 3'O-kinase
MAVTIGLTGGIAAGKSTVSAMMRELGLPVIDADEAARAVMKPGEEAYRDIVAEFGLGILRADGRIDRGKLRAIRFGDEQTRKVLNSIVGPAVLKKMLAEWEAHIGSGAKTVVLDIPLLFESGLQSWMDKVLVVYVDDDVQLRRLMARNGLTEEEALMRIRSQWPSAEKVKRADAVIDNNGTIEDTRRQLLDIVHQWDLLDKGGSGHHHHHH

SEQ ID NO: 2099 - DNA, 633 bp, synthetic construct
  misc_feature 1..633: note = Variant of 3'O-kinase
  source 1..633: mol_type = other DNA
atggcggttaccattggtttaacaggagggatcgcagctggcaaatcgactgtgagtgccatgatgcgtgaactgggtctgccggtcatcgatgctgacgaggcagcacgcgccgttatgaaaccaggcgaagaagcgtatcgcgacattgtagctgaattcgggccgggcatccttcgtgcggatggccgtatcgatcgcgggaaactgcgtgccatccgcttttcggacgaacaacaacgtaaggtgctgaattcgattgtaggtcctgcagtcctgaagaagatgctcgcggagtggctggctcatatcgggtcaggcgccaagacggttgtgctggatatcccgctgctgttcgaatccggattgcaatcgtggatggacaaagttctcgtggtgtacgttgatgatgatgttcagttacgccgccttatggcacgtaacgggctgactgaagaagaagctctgatgcgcattcgctcgcagtggcccagtgcggagaaagttaaacgtgcagacgctgtcatcgacaataatggcaccattgaagatacccgccgccagctgctggacattttacaccagtgggatctgctggacaaaggtggctccggccaccatcatcaccatcac

SEQ ID NO: 2100 - protein, 211 aa, synthetic construct
  REGION 1..211: note = Variant of 3'O-kinase
MAVTIGLTGGIAAGKSTVSAMMRELGLPVIDADEAARAVMKPGEEAYRDIVAEFGPGILRADGRIDRGKLRAIRFSDEQQRKVLNSIVGPAVLKKMLAEWLAHIGSGAKTVVLDIPLLFESGLQSWMDKVLVVYVDDDVQLRRLMARNGLTEEEALMRIRSQWPSAEKVKRADAVIDNNGTIEDTRRQLLDILHQWDLLDKGGSGHHHHHH

SEQ ID NO: 2101 - DNA, 633 bp, synthetic construct
  misc_feature 1..633: note = Variant of 3'O-kinase
  source 1..633: mol_type = other DNA
atggcggttaccattggtttaacaggagggatcgcagcgggcaaatcgactgtgagtgccatgatgcgtgaactgggtctgccggtcatcgatgctgacgaggcagcacgcgccgttatgaaaccaggcgaagaagcgtatcgcgacattgtagctgaattcgggccgggcatccttcgtgcggatggccgtatcgatcgcgggaaactgcgtgccatccgcttttcggacgaacaacaacgtaaggtgctgaattcgattgtaggtcctgcagtcctgaagaagatgctcgcggagtgggaagctcatatcgggtcaggcgccaagacggttgtgctggatatcccgctgctgttcgaatccggattgcaagagtggatggacaaagttctcgtggtgtacgttgatgatgatgttcagttacgccgccttatggcacgtaacgggctgactgaagaagaagctctgatgcgcattcgctcgcagtggcccagtgcggagaaagttaaacgtgcagacgctgtcatcgacaataatggcaccattgaagatacccgccgccagctgctggacattttacaccagtgggatctgctggacaaaggtggctccggccaccatcatcaccatcac

SEQ ID NO: 2102 - protein, 211 aa, synthetic construct
  REGION 1..211: note = Variant of 3'O-kinase
MAVTIGLTGGIAAGKSTVSAMMRELGLPVIDADEAARAVMKPGEEAYRDIVAEFGPGILRADGRIDRGKLRAIRFSDEQQRKVLNSIVGPAVLKKMLAEWEAHIGSGAKTVVLDIPLLFESGLQEWMDKVLVVYVDDDVQLRRLMARNGLTEEEALMRIRSQWPSAEKVKRADAVIDNNGTIEDTRRQLLDILHQWDLLDKGGSGHHHHHH

SEQ ID NO: 2103 - DNA, 633 bp, synthetic construct
  misc_feature 1..633: note = Variant of 3'O-kinase
  source 1..633: mol_type = other DNA
atggcggttaccattggtttaacaggagggatcgcagcgggcaaatcgactgtgagtgccatgatgcgtgaactgggttttccggtcatcgatgctgacgaggctgcacgcgccgttatgaaaccaggcgaagaagcgtatcgcctgattgtcgctgaattcgggccgggcatccttcgtgcggatggccgtatcgatcgcgggaaactgcgtgccatccgcttttcggacgaacaacaacgtaaggtgctgaattcgattgtaggtcctgcagtcctgaagaagatgctcgcggagtgggaagctcatatcgggtcaggcgccaagacggttgtgctggatatcccgctgctgttcgaatccggattgcaaagttggatggacaaagttctcgtggtgtacgttgatgatgatgttcagttacgccgccttatggcacgtaacgggctgactgaagaagaagctctgatgcgcattcgctcgcagtggcccagtgcggagaaagttaaagctgcagacgctgtcatcgacaataatggcaccattgaagatacccgccgccagctgctggacattttacaccagtgggatctgctggacaaaggtggctccggccaccatcatcaccatcac

SEQ ID NO: 2104 - protein, 211 aa, synthetic construct
  REGION 1..211: note = Variant of 3'O-kinase
MAVTIGLTGGIAAGKSTVSAMMRELGFPVIDADEAARAVMKPGEEAYRLIVAEFGPGILRADGRIDRGKLRAIRFSDEQQRKVLNSIVGPAVLKKMLAEWEAHIGSGAKTVVLDIPLLFESGLQSWMDKVLVVYVDDDVQLRRLMARNGLTEEEALMRIRSQWPSAEKVKAADAVIDNNGTIEDTRRQLLDILHQWDLLDKGGSGHHHHHH

SEQ ID NO: 2105 - DNA, 633 bp, synthetic construct
  misc_feature 1..633: note = Variant of 3'O-kinase
  source 1..633: mol_type = other DNA
atggcggttaccattggtttaacaggagggatcgcagctggcaaatcgactgtgagtgccatgatgcgtgaactgggtctgccggtcatcgatgctgacgaggcagcacgcgccgttatgaaaccaggcgaagaagcgtatcgcaatattgtagctgaattcgggccgggcatccttcgtgcggatggccgtatcgatcgcgggaaactgcgtgccatccgcttttcggacgaacaacaacgtaaggtgctgaattcgattgtaggtcctgcagtcctgaagaagatgctcgcggagtgggaagctcatatcgggtcaggcgccaagacggttgtgctggatatcccgctgctgttcgaatccggattgcaatcgtggatggacaaagttctcgtggtgtacgttgatgatgatgttcagttacgccgccttatggcacgtaacgggctgactgaagaagaagctctgatgcgcattcgctcgcagtggcccagtgcggagaaagttaaacgtgcagacgctgtcatcgacaataatggcaccattgaagatacccgccgccagctgctggacattttacaccagtgggatctgctggacaaaggtggctccggccaccatcatcaccatcac

SEQ ID NO: 2106 - protein, 211 aa, synthetic construct
  REGION 1..211: note = Variant of 3'O-kinase
MAVTIGLTGGIAAGKSTVSAMMRELGLPVIDADEAARAVMKPGEEAYRNIVAEFGPGILRADGRIDRGKLRAIRFSDEQQRKVLNSIVGPAVLKKMLAEWEAHIGSGAKTVVLDIPLLFESGLQSWMDKVLVVYVDDDVQLRRLMARNGLTEEEALMRIRSQWPSAEKVKRADAVIDNNGTIEDTRRQLLDILHQWDLLDKGGSGHHHHHH

SEQ ID NO: 2107 - DNA, 633 bp, synthetic construct
  misc_feature 1..633: note = Variant of 3'O-kinase
  source 1..633: mol_type = other DNA
atggcggttaccattggtttaacaggagggatcgcagcgggcaaatcgactgtgagtgccatgatgcgtgaactgggtctgccggtcatcgatgctgacgaggcagcacgcgccgttatgaaaccaggcgaagaagcgtatcgcgacattgtagctgaattcgggccgggcatccttgtcgcggatggccgtatcgatcgcgggaaactgcgtgccatccgcttttcggacgaacaacaacgtaaggtgctgaattcgattgtaggtcctgcagtcctgaagaagatgctcgcggagtgggaagctcatatcgggtcaggcgccaagacggttgtgctggatatcccgctgctgttcgaatccggattgcaatcgtggatggacaaagttctcgtggtgtacgttgatgatgatgttcagttacgccgccttatggcacgtaacgggctgactgaagaagaagctctgatgcgcattcgctcgcagtggcccagtgcggagaaagttaaacgtgcagacgctgtcatcgacaataatggcaccattgaagatacccgccgccagctgctggacattttacaccagtgggatctgctggacaaaggtggctccggccaccatcatcaccatcac

SEQ ID NO: 2108 - protein, 211 aa, synthetic construct
  REGION 1..211: note = Variant of 3'O-kinase
MAVTIGLTGGIAAGKSTVSAMMRELGLPVIDADEAARAVMKPGEEAYRDIVAEFGPGILVADGRIDRGKLRAIRFSDEQQRKVLNSIVGPAVLKKMLAEWEAHIGSGAKTVVLDIPLLFESGLQSWMDKVLVVYVDDDVQLRRLMARNGLTEEEALMRIRSQWPSAEKVKRADAVIDNNGTIEDTRRQLLDILHQWDLLDKGGSGHHHHHH

SEQ ID NO: 2109 - DNA, 633 bp, synthetic construct
  misc_feature 1..633: note = Variant of 3'O-kinase
  source 1..633: mol_type = other DNA
atggcggttaccattggtttaacaggagggatcgcagcgggcaaatcgactgtgagtgccatgatgcgtgaactgggtctgccggtcatcgatgctgacgaggcagcacgcgccgttatgaaaccaggcgaagaagcgtatcgcgacattgtagctgaattcgggccgggcatccttcgtgcggatggccgtatcgatcgcgggaaactgcgtgccatccgcttttcggacgaacaacaacgtaaggtgctgaattcgattgtaggtcctgcagtcctgaagaagatgctcggggagtgggaagctcatatcgggtcaggcgccaagacggttgtgctggatatcccgctgctgttcgaatccggattgcaatcgtggatggacaaagttctcgtggtgtacgttgatgatgatgttcagttacgccgccttatggcacgtaacgggctgactgaagaagaagctctgatgcgcattcgctcgcagtggcccagtgcggagaaagttaaacgtgcagacgctgtcatcgacaataatggcaccattgaagatacccgccgccagctgctggacattttacaccagtgggatctgctggacaaaggtggctccggccaccatcatcaccatcac

SEQ ID NO: 2110 - protein, 211 aa, synthetic construct
  REGION 1..211: note = Variant of 3'O-kinase
MAVTIGLTGGIAAGKSTVSAMMRELGLPVIDADEAARAVMKPGEEAYRDIVAEFGPGILRADGRIDRGKLRAIRFSDEQQRKVLNSIVGPAVLKKMLGEWEAHIGSGAKTVVLDIPLLFESGLQSWMDKVLVVYVDDDVQLRRLMARNGLTEEEALMRIRSQWPSAEKVKRADAVIDNNGTIEDTRRQLLDILHQWDLLDKGGSGHHHHHH

SEQ ID NO: 2111 - DNA, 633 bp, synthetic construct
  misc_feature 1..633: note = Variant of 3'O-kinase
  source 1..633: mol_type = other DNA
atggcggttaccattggtttaacaggagggatcgcagcgggcaaatcgactgtgagtgccatgatgcgtgaactgggtctgccggtcatcgatgctgacgaggcagcacgcgccgttatgaaaccaggcgaagaagcgtatcgcgacattgtagctgaattcgggccgggcatccttcgtgcggatggccgtatcgatcgcgggaaactgcgtgccatccgcttttcggacgaacaacaacgtaaggtgctgaattcgattgtaggtcctgcagtcctgaagaagatgctcgcggagtgggaagctcatatcgggtcaggcgccaagacggttgtgctggatatcccgctgctgttcgaatccggattgcaaagttggatggacaaagttctcgtggtgtacgttgatgatgatgttcagttacgccgccttatggcacgtaacgggctgactgaagaagaagctctgatgcgcattcgctcgcagtggcccagtgcggagaaagttaaactggcagacgctgtcatcgacaataatggcaccattgaagatacccctcgccagctgctggacattttacaccagtgggatctgctggacaaaggtggctccggccaccatcatcaccatcac

SEQ ID NO: 2112 - protein, 211 aa, synthetic construct
  REGION 1..211: note = Variant of 3'O-kinase
MAVTIGLTGGIAAGKSTVSAMMRELGLPVIDADEAARAVMKPGEEAYRDIVAEFGPGILRADGRIDRGKLRAIRFSDEQQRKVLNSIVGPAVLKKMLAEWEAHIGSGAKTVVLDIPLLFESGLQSWMDKVLVVYVDDDVQLRRLMARNGLTEEEALMRIRSQWPSAEKVKLADAVIDNNGTIEDTPRQLLDILHQWDLLDKGGSGHHHHHH

SEQ ID NO: 2113 - DNA, 633 bp, synthetic construct
  misc_feature 1..633: note = Variant of 3'O-kinase
  source 1..633: mol_type = other DNA
atggcggttaccattggtttaacaggagggatcgcagcgggcaaatcgactgtgagtgccatgatgcgtgaactgggtctgccggtcatcgatgctgacgaggcagcacgcgccgttatgaaaccaggcgaagaagcgtatcgcgacattgtagctgaattcgggccgggcatccttgctgaagatggccgtatcgatcgcgggaaactgcgtgccatccgcttttcggacgaacaacaacgtaaggtgctgaattcgattgtaggtcctgcagtcctgaagaagatgctcgcggagtgggaagctcatatcgggtcaggcgccaagacggttgtgctggatatcccgctgctgttcgaatccggattgcaatcgtggatggacaaagttctcgtggtgtacgttgatgatgatgttcagttacgccgccttatggcacgtaacgggctgactgaagaagaagctctgatgcgcattcgctcgcagtggccccaggcggagaaagttaaacgtgcagacgctgtcatcgacaataatggcaccattgaagatacccgccgccagctgctggacattttacaccagtgggatctgctggacaaaggtggctccggccaccatcatcaccatcac

SEQ ID NO: 2114 - protein, 211 aa, synthetic construct
  REGION 1..211: note = Variant of 3'O-kinase
MAVTIGLTGGIAAGKSTVSAMMRELGLPVIDADEAARAVMKPGEEAYRDIVAEFGPGILAEDGRIDRGKLRAIRFSDEQQRKVLNSIVGPAVLKKMLAEWEAHIGSGAKTVVLDIPLLFESGLQSWMDKVLVVYVDDDVQLRRLMARNGLTEEEALMRIRSQWPQAEKVKRADAVIDNNGTIEDTRRQLLDILHQWDLLDKGGSGHHHHHH

SEQ ID NO: 2115 - DNA, 633 bp, synthetic construct
  misc_feature 1..633: note = Variant of 3'O-kinase
  source 1..633: mol_type = other DNA
atggcggttaccattggtttaacaggagggatcgcagcgggcaaatcgactgtgagtgccatgatgcgtgaactgggtctgccggtcatcgatgctgacgaggcagcacgcgccgttatgaaaccaggcgaagaagcgtatcgcgacattgtagctgaattcgggccgggcatccttgctgaagatggccgtatcgatcgcgggaaactgcgtgccatccgcttttcggacgaacaacaacgtaaggtgctgaattcgattgtaggtcctgcagtcctgaagaagatgctcgcggagaatgaagctcatatcgggtcaggcgccaagacggttgtgctggatatcccgctgctgttcgaatccggattgcaatcgtggatggacaaagttctcgtggtgtacgttgatgatgatgttcagttacgccgccttatggcacgtaacgggctgactgaagaagaagctctgatgcgcattcgctcgcagtggcccagtgcggagaaagttaaacgtgcagacgctgtcatcgacaataatggcaccattgaagatacccgccgccagctgctggacattttacaccagtgggatctgctggacaaaggtggctccggccaccatcatcaccatcac

SEQ ID NO: 2116 - protein, 211 aa, synthetic construct
  REGION 1..211: note = Variant of 3'O-kinase
MAVTIGLTGGIAAGKSTVSAMMRELGLPVIDADEAARAVMKPGEEAYRDIVAEFGPGILAEDGRIDRGKLRAIRFSDEQQRKVLNSIVGPAVLKKMLAENEAHIGSGAKTVVLDIPLLFESGLQSWMDKVLVVYVDDDVQLRRLMARNGLTEEEALMRIRSQWPSAEKVKRADAVIDNNGTIEDTRRQLLDILHQWDLLDKGGSGHHHHHH

SEQ ID NO: 2117 - DNA, 633 bp, synthetic construct
  misc_feature 1..633: note = Variant of 3'O-kinase
  source 1..633: mol_type = other DNA
atggcggttaccattggtttaacaggagggatcgcagcgggcaaatcgactgtgagtgccatgatgcgtgaactgggtctgccggtcatcgatgctgacgaggcagcacgcgccgttatgaaaccaggcgaagaagcgtatcgcgacattgtagctgaattcgggccgggcatccttgctgaagatggccgtatcgatcgcgggaaactgcgtgccatccgcttttcggacgaacaacaacgtaaggtgctgaattcgattgtaggtcctgcagtcctgaagaagatgctcgcggagtgggaagctcatatcgggtcaggcgccaagacggttgtgctggatatcccgctgctgttcgaatccggattgcaatcgtggatggacaaagttctcgtggtgtacgttgatgatgatgttcagttacgccgccttatggcacgtaacgggctgactgaagaagaagctctgatgcgcattcgctcgcagtggcccagtgcggagaaagttaaacgtgcagacgctgtcatcgacaataatggcaccattgaagatacccgccgccagctgctggacattgtgcaccagtgggatctgctggacaaaggtggctccggccaccatcatcaccatcac

SEQ ID NO: 2118 - protein, 211 aa, synthetic construct
  REGION 1..211: note = Variant of 3'O-kinase
MAVTIGLTGGIAAGKSTVSAMMRELGLPVIDADEAARAVMKPGEEAYRDIVAEFGPGILAEDGRIDRGKLRAIRFSDEQQRKVLNSIVGPAVLKKMLAEWEAHIGSGAKTVVLDIPLLFESGLQSWMDKVLVVYVDDDVQLRRLMARNGLTEEEALMRIRSQWPSAEKVKRADAVIDNNGTIEDTRRQLLDIVHQWDLLDKGGSGHHHHHH

SEQ ID NO: 2119 - DNA, 633 bp, synthetic construct
  misc_feature 1..633: note = Variant of 3'O-kinase
  source 1..633: mol_type = other DNA
atggcggttaccattggtttaacaggagggatcgcagcgggcaaatcgactgtgagtgccatgatgcgtgaactgggtctgccggtcatcgatgctgacgaggcagcacgcgccgttatgaaaccaggcgaagaagcgtatgaggacattgtagctgaattcgggccgggcatccttgctgaagatggccgtatcgatcgcgggaaactgcgtgccatccgcttttcggacgaacaacaacgtaaggtgctgaattcgattgtaggtcctgcagtcctgaagaagatgctcgcggagtgggaagctcatatcgggtcaggcgccaagacggttgtgctggatatcccgctgctgttcgaatccggattgcaatcgtggatggacaaagttctcgtggtgtacgttgatgatgatgttcagttacgccgccttatggcacgtaacgggctgactgaagaagaagctctgatgcgcattcgctcgcagtggcccagtgcggagaaagttaaacgtgcagacgctgtcatcgacaataatggcaccattgaagatacccgccgccagctgctggacattttacaccagtgggatctgctggacaaaggtggctccggccaccatcatcaccatcac

SEQ ID NO: 2120 - protein, 211 aa, synthetic construct
  REGION 1..211: note = Variant of 3'O-kinase
MAVTIGLTGGIAAGKSTVSAMMRELGLPVIDADEAARAVMKPGEEAYEDIVAEFGPGILAEDGRIDRGKLRAIRFSDEQQRKVLNSIVGPAVLKKMLAEWEAHIGSGAKTVVLDIPLLFESGLQSWMDKVLVVYVDDDVQLRRLMARNGLTEEEALMRIRSQWPSAEKVKRADAVIDNNGTIEDTRRQLLDILHQWDLLDKGGSGHHHHHH

SEQ ID NO: 2121 - DNA, 633 bp, synthetic construct
  misc_feature 1..633: note = Variant of 3'O-kinase
  source 1..633: mol_type = other DNA
atggcggttaccattggtttaacaggagggatcgcagcgggcaaatcgactgtgagtgccatgatgcgtgaactgggtctgccggtcatcgatgctgacgaggcagcacgcgccgttatgaaaccaggcgaagaagcgtatcgcgacattgtagacgaattcgggccgggcatccttgctgaagatggccgtatcgatcgcgggaaactgcgtgccatccgcttttcggacgaacaacaacgtaaggtgctgaattcgattgtaggtcctgcagtcctgaagaagatgctcgcggagtgggaagctcatatcgggtcaggcgccaagacggttgtgctggatatcccgctgctgttcgaatccggattgcaatcgtggatggacaaagttctcgtggtgtacgttgatgatgatgttcagttacgccgccttatggcacgtaacgggctgactgaagaagaagctctgatgcgcattcgctcgcagtggcccagtgcggagaaagttaaacgtgcagacgctgtcatcgacaataatggcaccattgaagatacccgccgccagctgctggacattttacaccagtgggatctgctggacaaaggtggctccggccaccatcatcaccatcac

SEQ ID NO: 2122 - protein, 211 aa, synthetic construct
  REGION 1..211: note = Variant of 3'O-kinase
MAVTIGLTGGIAAGKSTVSAMMRELGLPVIDADEAARAVMKPGEEAYRDIVDEFGPGILAEDGRIDRGKLRAIRFSDEQQRKVLNSIVGPAVLKKMLAEWEAHIGSGAKTVVLDIPLLFESGLQSWMDKVLVVYVDDDVQLRRLMARNGLTEEEALMRIRSQWPSAEKVKRADAVIDNNGTIEDTRRQLLDILHQWDLLDKGGSGHHHHHH

SEQ ID NO: 2123 - DNA, 1257 bp, synthetic construct
  misc_feature 1..1257: note = Variant of acetate kinase
  source 1..1257: mol_type = other DNA
atgcaccatcatcatcatcatggcggtagcggcatgaaagttctggtgattaattctggtagctcctccatcaaatatcagctcctcgatatgaccaacgaaaaggtattagcgaaaggcttggtcgagcgcattggcatcgacggttcgcgtatcgtgcataaagttaacggcgaaaaacacgtgctggaacatgagattaagaatcacgaaattggacttaaattggtcctggatcttcttacggacgaaaaatacggtgtgttgaaggatctcaaagaaatcgatgcagttgggcatcgcgtagtacatggcggcgagcgttttgccagtagcgtgaagattactgacgaagtcttaaagaccatcgagacgttgtcgttcttagctccgttacacaatccagcgaacattatgggtatcaagagcagcatgaaagtgttaccgggtgtgcctcaagttgccgtctttgatacagcgttccaccagaagatgccggagaaagcctatttgtacgcaatcccctatgagtactacgagaaatataaaattcgccgctatgggtttcatggaacctcacatcgttatgtgagtaaacgtgctgcggaaattatgggcaaaccgtacgatcagctcaagatcattaccgttcacgtgggtaacggcgcatcagttgcggcggtgaagaatggcgtatctgttgacacttccatgggtttcacaccacttgaaggtcttgtcatgggcacgcgcagcggcgatattgatccggccatcgtggaatttcttgagaaagaagaaggattgtcggccaaagaagtcgtcaacatcctcaacaagaaatctggtgtgtatgggctcaccaaaggctttagtagtgacatgcgtgacattgtggataatgctattgaaggtgatcctgtatgccgccttgcattagatgtgtacgaatatcgtatcgcgaaatatattggcgcatacgctgcggccatgaacggtgttgacgcgatcgtctttaccgcaggagttggcgaaaatagcccgattatgcgcgaagaaattattgagaactacttgggctacttagggatcaagatcgataaagaagccaatgacttcaaaggtgaggagaagatcatttcaacgcccgattccaaagtgattgcgatggtagttccgaccaacgaggagctcatgatcgccaaagacacgaaagaaatcattgagaaagggttggacgagcttaagatctaatga

SEQ ID NO: 2124 - protein, 417 aa, synthetic construct
  REGION 1..417: note = Variant of acetate kinase
MHHHHHHGGSGMKVLVINSGSSSIKYQLLDMTNEKVLAKGLVERIGIDGSRIVHKVNGEKHVLEHEIKNHEIGLKLVLDLLTDEKYGVLKDLKEIDAVGHRVVHGGERFASSVKITDEVLKTIETLSFLAPLHNPANIMGIKSSMKVLPGVPQVAVFDTAFHQKMPEKAYLYAIPYEYYEKYKIRRYGFHGTSHRYVSKRAAEIMGKPYDQLKIITVHVGNGASVAAVKNGVSVDTSMGFTPLEGLVMGTRSGDIDPAIVEFLEKEEGLSAKEVVNILNKKSGVYGLTKGFSSDMRDIVDNAIEGDPVCRLALDVYEYRIAKYIGAYAAAMNGVDAIVFTAGVGENSPIMREEIIENYLGYLGIKIDKEANDFKGEEKIISTPDSKVIAMVVPTNEELMIAKDTKEIIEKGLDELKI

SEQ ID NO: 2125 - DNA, 1587 bp, synthetic construct; identical to SEQ ID NO: 367
  misc_feature 1..1587: note = Variant of terminal deoxynucleotidyl transferase
  source 1..1587: mol_type = other DNA

SEQ ID NO: 2126 - protein, 529 aa, synthetic construct; identical to SEQ ID NO: 368
  REGION 1..529: note = Variant of terminal deoxynucleotidyl transferase

SEQ ID NO: 2127 - DNA, 1587 bp, synthetic construct; identical to SEQ ID NO: 369
  misc_feature 1..1587: note = Variant of terminal deoxynucleotidyl transferase
  source 1..1587: mol_type = other DNA

SEQ ID NO: 2128 - protein, 529 aa, synthetic construct; identical to SEQ ID NO: 370
  REGION 1..529: note = Variant of terminal deoxynucleotidyl transferase

SEQ ID NO: 2129 - DNA, 18 bp, synthetic construct
  misc_feature 1..18: note = Modified oligo substrate or product
  modified_base 17^18: mod_base = OTHER; note = there is a phosphorothioate bond between these bases
  modified_base 1: mod_base = OTHER; note = 5'-6-carboxyfluorescein-thymidine
  modified_base 18: mod_base = OTHER; note = 2'-O-methylguanosine
  source 1..18: mol_type = other DNA
nttttttttttttttatn

SEQ ID NO: 2130 - DNA, 20 bp, synthetic construct
  misc_feature 1..20: note = Modified oligo substrate or product
  modified_base 1: mod_base = OTHER; note = 5'-6-carboxyfluorescein-thymidine
  modified_base 18: mod_base = OTHER; note = 2'-O-methyladenosine
  modified_base 19: mod_base = OTHER; note = 2'-O-methyluridine
  modified_base 20: mod_base = OTHER; note = 2'-O-methylcytidine
  source 1..20: mol_type = other DNA
nttttttttttttttttnnn

SEQ ID NO: 2131 - DNA, 19 bp, synthetic construct
  misc_feature 1..19: note = Modified oligo substrate or product
  modified_base 17^18: mod_base = OTHER; note = there is a phosphorothioate bond between these bases
  modified_base 1: mod_base = OTHER; note = 5'-6-carboxyfluorescein-thymidine
  modified_base 18: mod_base = OTHER; note = 2'-O-methylguanosine
  modified_base 19: mod_base = OTHER; note = adenosine ribonucleotide with a 3'-PO4 blocking group
  source 1..19: mol_type = other DNA
nttttttttttttttatnn

SEQ ID NO: 2132 - DNA, 19 bp, synthetic construct
  misc_feature 1..19: note = Modified oligo substrate or product
  modified_base 17^18: mod_base = OTHER; note = there is a phosphorothioate bond between these bases
  modified_base 1: mod_base = OTHER; note = 5'-6-carboxyfluorescein-thymidine
  modified_base 18: mod_base = OTHER; note = 2'-O-methylguanosine
  modified_base 19: mod_base = OTHER; note = cytidine ribonucleotide with a 3'-PO4 blocking group
  source 1..19: mol_type = other DNA
nttttttttttttttatnn

SEQ ID NO: 2133 - DNA, 19 bp, synthetic construct
  misc_feature 1..19: note = Modified oligo substrate or product
  modified_base 17^18: mod_base = OTHER; note = there is a phosphorothioate bond between these bases
  modified_base 1: mod_base = OTHER; note = 5'-6-carboxyfluorescein-thymidine
  modified_base 18: mod_base = OTHER; note = 2'-O-methylguanosine
  modified_base 19: mod_base = OTHER; note = guanosine ribonucleotide with a 3'-PO4 blocking group
  source 1..19: mol_type = other DNA
nttttttttttttttatnn

SEQ ID NO: 2134 - DNA, 19 bp, synthetic construct
  misc_feature 1..19: note = Modified oligo substrate or product
  modified_base 17^18: mod_base = OTHER; note = there is a phosphorothioate bond between these bases
  modified_base 1: mod_base = OTHER; note = 5'-6-carboxyfluorescein-thymidine
  modified_base 18: mod_base = OTHER; note = 2'-O-methylguanosine
  modified_base 19: mod_base = OTHER; note = uridine ribonucleotide with a 3'-PO4 blocking group
  source 1..19: mol_type = other DNA
nttttttttttttttatnn

SEQ ID NO: 2135 - DNA, 19 bp, synthetic construct
  misc_feature 1..19: note = Modified oligo substrate or product
  modified_base 17^18: mod_base = OTHER; note = there is a phosphorothioate bond between these bases
  modified_base 1: mod_base = OTHER; note = 5'-6-carboxyfluorescein-thymidine
  modified_base 18: mod_base = OTHER; note = 2'-O-methylguanosine
  modified_base 19: mod_base = OTHER; note = 2'-deoxyfluoroadenosine with a 3'-PO4 blocking group
  source 1..19: mol_type = other DNA
nttttttttttttttatnn

SEQ ID NO: 2136 - DNA, 19 bp, synthetic construct
  misc_feature 1..19: note = Modified oligo substrate or product
  modified_base 17^18: mod_base = OTHER; note = there is a phosphorothioate bond between these bases
  modified_base 1: mod_base = OTHER; note = 5'-6-carboxyfluorescein-thymidine
  modified_base 18: mod_base = OTHER; note = 2'-O-methylguanosine
  modified_base 19: mod_base = OTHER; note = 2'-deoxyfluoroguanosine with a 3'-PO4 blocking group
  source 1..19: mol_type = other DNA
nttttttttttttttatnn

SEQ ID NO: 2137 - DNA, 19 bp, synthetic construct
  misc_feature 1..19: note = Modified oligo substrate or product
  modified_base 17^18: mod_base = OTHER; note = there is a phosphorothioate bond between these bases
  modified_base 1: mod_base = OTHER; note = 5'-6-carboxyfluorescein-thymidine
  modified_base 18: mod_base = OTHER; note = 2'-O-methylguanosine
  modified_base 19: mod_base = OTHER; note = 2'-deoxyfluorocytidine with a 3'-PO4 blocking group
  source 1..19: mol_type = other DNA
nttttttttttttttatnn

SEQ ID NO: 2138 - DNA, 19 bp, synthetic construct
  misc_feature 1..19: note = Modified oligo substrate or product
  modified_base 17^18: mod_base = OTHER; note = there is a phosphorothioate bond between these bases
  modified_base 1: mod_base = OTHER; note = 5'-6-carboxyfluorescein-thymidine
  modified_base 18: mod_base = OTHER; note = 2'-O-methylguanosine
  modified_base 19: mod_base = OTHER; note = 2'-O-methyluridine with a 3'-PO4 blocking group
  source 1..19: mol_type = other DNA
nttttttttttttttatnn

SEQ ID NO: 2139 - DNA, 19 bp, synthetic construct
  misc_feature 1..19: note = Modified oligo substrate or product
  modified_base 17^18: mod_base = OTHER; note = there is a phosphorothioate bond between these bases
  modified_base 1: mod_base = OTHER; note = 5'-6-carboxyfluorescein-thymidine
  modified_base 18: mod_base = OTHER; note = 2'-O-methylguanosine
  modified_base 19: mod_base = OTHER; note = 2'-O-methyladenosine with a 3'-PO4 blocking group
  source 1..19: mol_type = other DNA
nttttttttttttttatnn

SEQ ID NO: 2140 - DNA, 19 bp, synthetic construct
  misc_feature 1..19: note = Modified oligo substrate or product
  modified_base 17^18: mod_base = OTHER; note = there is a phosphorothioate bond between these bases
  modified_base 1: mod_base = OTHER; note = 5'-6-carboxyfluorescein-thymidine
  modified_base 18: mod_base = OTHER; note = 2'-O-methylguanosine
  modified_base 19: mod_base = OTHER; note = 2'-O-methylguanosine with a 3'-PO4 blocking group
  source 1..19: mol_type = other DNA
nttttttttttttttatnn

SEQ ID NO: 2141 - DNA, 19 bp, synthetic construct
  misc_feature 1..19: note = Modified oligo substrate or product
  modified_base 17^18: mod_base = OTHER; note = there is a phosphorothioate bond between these bases
  modified_base 1: mod_base = OTHER; note = 5'-6-carboxyfluorescein-thymidine
  modified_base 18: mod_base = OTHER; note = 2'-O-methylguanosine
  modified_base 19: mod_base = OTHER; note = 2'-O-methylcytidine with a 3'-PO4 blocking group
  source 1..19: mol_type = other DNA
nttttttttttttttatnn

SEQ ID NO: 2142 - DNA, 19 bp, synthetic construct
  misc_feature 1..19: note = Modified oligo substrate or product
  modified_base 17^18: mod_base = OTHER; note = there is a phosphorothioate bond between these bases
  modified_base 1: mod_base = OTHER; note = 5'-6-carboxyfluorescein-thymidine
  modified_base 18: mod_base = OTHER; note = 2'-O-methylguanosine
  modified_base 19: mod_base = OTHER; note = 2'-O-methyluridine with a 3'-PO4 blocking group
  source 1..19: mol_type = other DNA
nttttttttttttttatnn

SEQ ID NO: 2143 - DNA, 19 bp, synthetic construct
  misc_feature 1..19: note = Modified oligo substrate or product
  modified_base 17^18: mod_base = OTHER; note = there is a phosphorothioate bond between these bases
  modified_base 18^19: mod_base = OTHER; note = there is a phosphorothioate bond between these bases
  modified_base 1: mod_base = OTHER; note = 5'-6-carboxyfluorescein-thymidine
  modified_base 18: mod_base = OTHER; note = 2'-O-methylguanosine
  modified_base 19: mod_base = OTHER; note = adenosine ribonucleotide with a 3'-PO4 blocking group
  source 1..19: mol_type = other DNA
nttttttttttttttatnn

SEQ ID NO: 2144 - DNA, 19 bp, synthetic construct
  misc_feature 1..19: note = Modified oligo substrate or product
  modified_base 17^18: mod_base = OTHER; note = there is a phosphorothioate bond between these bases
  modified_base 18^19: mod_base = OTHER; note = there is a phosphorothioate bond between these bases
  modified_base 1: mod_base = OTHER; note = 5'-6-carboxyfluorescein-thymidine
  modified_base 18: mod_base = OTHER; note = 2'-O-methylguanosine
  modified_base 19: mod_base = OTHER; note = cytidine ribonucleotide with a 3'-PO4 blocking group
  source 1..19: mol_type = other DNA
nttttttttttttttatnn

SEQ ID NO: 2145 - DNA, 21 bp, synthetic construct
  misc_feature 1..21: note = Modified oligo substrate or product
  modified_base 1: mod_base = OTHER; note = 5'-6-carboxyfluorescein-thymidine
  modified_base 18: mod_base = OTHER; note = 2'-O-methyladenosine
  modified_base 19: mod_base = OTHER; note = 2'-O-methyluridine
  modified_base 20: mod_base = OTHER; note = 2'-O-methylcytidine
  modified_base 21: mod_base = OTHER; note = adenosine ribonucleotide with a 3'-PO4 blocking group
  source 1..21: mol_type = other DNA
nttttttttttttttttnnnn

SEQ ID NO: 2146 - DNA, 21 bp, synthetic construct
  misc_feature 1..21: note = Modified oligo substrate or product
  modified_base 1: mod_base = OTHER; note = 5'-6-carboxyfluorescein-thymidine
  modified_base 18: mod_base = OTHER; note = 2'-O-methyladenosine
  modified_base 19: mod_base = OTHER; note = 2'-O-methyluridine
  modified_base 20: mod_base = OTHER; note = 2'-O-methylcytidine
  modified_base 21: mod_base = OTHER; note = cytidine ribonucleotide with a 3'-PO4 blocking group
  source 1..21: mol_type = other DNA
nttttttttttttttttnnnn

SEQ ID NO: 2147 - DNA, 21 bp, synthetic construct
  misc_feature 1..21: note = Modified oligo substrate or product
  modified_base 1: mod_base = OTHER; note = 5'-6-carboxyfluorescein-thymidine
  modified_base 18: mod_base = OTHER; note = 2'-O-methyladenosine
  modified_base 19: mod_base = OTHER; note = 2'-O-methyluridine
  modified_base 20: mod_base = OTHER; note = 2'-O-methylcytidine
  modified_base 21: mod_base = OTHER; note = guanosine ribonucleotide with a 3'-PO4 blocking group
  source 1..21: mol_type = other DNA
nttttttttttttttttnnnn

SEQ ID NO: 2148 - DNA, 21 bp, synthetic construct
  misc_feature 1..21: note = Modified oligo substrate or product
  modified_base 1: mod_base = OTHER; note = 5'-6-carboxyfluorescein-thymidine
  modified_base 18: mod_base = OTHER; note = 2'-O-methyladenosine
  modified_base 19: mod_base = OTHER; note = 2'-O-methyluridine
  modified_base 20: mod_base = OTHER; note = 2'-O-methylcytidine
  modified_base 21: mod_base = OTHER; note = uridine ribonucleotide with a 3'-PO4 blocking group
  source 1..21: mol_type = other DNA
nttttttttttttttttnnnn

SEQ ID NO: 2149 - DNA, 21 bp, synthetic construct
  misc_feature 1..21: note = Modified oligo substrate or product
  modified_base 1: mod_base = OTHER; note = 5'-6-carboxyfluorescein-thymidine
  modified_base 18: mod_base = OTHER; note = 2'-O-methyladenosine
  modified_base 19: mod_base = OTHER; note = 2'-O-methyluridine
  modified_base 20: mod_base = OTHER; note = 2'-O-methylcytidine
  modified_base 21: mod_base = OTHER; note = 2'-deoxyfluoroadenosine with a 3'-PO4 blocking group
  source 1..21: mol_type = other DNA
nttttttttttttttttnnnn

SEQ ID NO: 2150 - DNA, 21 bp, synthetic construct
  misc_feature 1..21: note = Modified oligo substrate or product
  modified_base 1: mod_base = OTHER; note = 5'-6-carboxyfluorescein-thymidine
  modified_base 18: mod_base = OTHER; note = 2'-O-methyladenosine
  modified_base 19: mod_base = OTHER; note = 2'-O-methyluridine
  modified_base 20: mod_base = OTHER; note = 2'-O-methylcytidine
  modified_base 21: mod_base = OTHER; note = 2'-deoxyfluoroguanosine with a 3'-PO4 blocking group
  source 1..21: mol_type = other DNA
nttttttttttttttttnnnn

SEQ ID NO: 2151 - DNA, 21 bp, synthetic construct
  misc_feature 1..21: note = Modified oligo substrate or product
  modified_base 1: mod_base = OTHER; note = 5'-6-carboxyfluorescein-thymidine
  modified_base 18: mod_base = OTHER; note = 2'-O-methyladenosine
  modified_base 19: mod_base = OTHER; note = 2'-O-methyluridine
  modified_base 20: mod_base = OTHER; note = 2'-O-methylcytidine
  modified_base 21: mod_base = OTHER; note = 2'-deoxyfluorocytidine with a 3'-PO4 blocking group
  source 1..21: mol_type = other DNA
nttttttttttttttttnnnn

SEQ ID NO: 2152 - DNA, 21 bp, synthetic construct
  misc_feature 1..21: note = Modified oligo substrate or product
  modified_base 1: mod_base = OTHER; note = 5'-6-carboxyfluorescein-thymidine
  modified_base 18: mod_base = OTHER; note = 2'-O-methyladenosine
  modified_base 19: mod_base = OTHER; note = 2'-O-methyluridine
  modified_base 20: mod_base = OTHER; note = 2'-O-methylcytidine
  modified_base 21: mod_base = OTHER; note = 2'-O-methyluridine with a 3'-PO4 blocking group
  source 1..21: mol_type = other DNA
nttttttttttttttttnnnn

SEQ ID NO: 2153 - DNA, 21 bp, synthetic construct
  misc_feature 1..21: note = Modified oligo substrate or product
  modified_base 1: mod_base = OTHER; note = 5'-6-carboxyfluorescein-thymidine
  modified_base 18: mod_base = OTHER; note = 2'-O-methyladenosine
  modified_base 19: mod_base = OTHER; note = 2'-O-methyluridine
  modified_base 20: mod_base = OTHER; note = 2'-O-methylcytidine
  modified_base 21: mod_base = OTHER; note = 2'-O-methyladenosine with a 3'-PO4 blocking group
  source 1..21: mol_type = other DNA
nttttttttttttttttnnnn

SEQ ID NO: 2154 - DNA, 21 bp, synthetic construct
  misc_feature 1..21: note = Modified oligo substrate or product
  modified_base 1: mod_base = OTHER; note = 5'-6-carboxyfluorescein-thymidine
  modified_base 18: mod_base = OTHER; note = 2'-O-methyladenosine
  modified_base 19: mod_base = OTHER; note = 2'-O-methyluridine
  modified_base 20: mod_base = OTHER; note = 2'-O-methylcytidine
  modified_base 21: mod_base = OTHER; note = 2'-O-methylguanosine with a 3'-PO4 blocking group
  source 1..21: mol_type = other DNA
nttttttttttttttttnnnn

SEQ ID NO: 2155 - DNA, 21 bp, synthetic construct
  misc_feature 1..21: note = Modified oligo substrate or product
  modified_base 1: mod_base = OTHER; note = 5'-6-carboxyfluorescein-thymidine
  modified_base 18: mod_base = OTHER; note = 2'-O-methyladenosine
  modified_base 19: mod_base = OTHER; note = 2'-O-methyluridine
  modified_base 20: mod_base = OTHER; note = 2'-O-methylcytidine
  modified_base 21: mod_base = OTHER; note = 2'-O-methylcytidine with a 3'-PO4 blocking group
  source 1..21: mol_type = other DNA
nttttttttttttttttnnnn

SEQ ID NO: 2156 - DNA, 21 bp, synthetic construct
  misc_feature 1..21: note = Modified oligo substrate or product
  modified_base 1: mod_base = OTHER; note = 5'-6-carboxyfluorescein-thymidine
  modified_base 18: mod_base = OTHER; note = 2'-O-methyladenosine
  modified_base 19: mod_base = OTHER; note = 2'-O-methyluridine
  modified_base 20: mod_base = OTHER; note = 2'-O-methylcytidine
  modified_base 21: mod_base = OTHER; note = 2'-O-methyluridine with a 3'-PO4 blocking group
  source 1..21: mol_type = other DNA
nttttttttttttttttnnnn

SEQ ID NO: 2157 - DNA, 21 bp, synthetic construct
  misc_feature 1..21: note = Modified oligo substrate or product
  modified_base 20^21: mod_base = OTHER; note = there is a phosphorothioate bond between these bases
  modified_base 1: mod_base = OTHER; note = 5'-6-carboxyfluorescein-thymidine
  modified_base 18: mod_base = OTHER; note = 2'-O-methyladenosine
  modified_base 19: mod_base = OTHER; note = 2'-O-methyluridine
  modified_base 20: mod_base = OTHER; note = 2'-O-methylcytidine
  modified_base 21: mod_base = OTHER; note = adenosine ribonucleotide with a 3'-PO4 blocking group
  source 1..21: mol_type = other DNA
nttttttttttttttttnnnn

SEQ ID NO: 2158 - DNA, 21 bp, synthetic construct
  misc_feature 1..21: note = Modified oligo substrate or product
  modified_base 20^21: mod_base = OTHER; note = there is a phosphorothioate bond between these bases
  modified_base 1: mod_base = OTHER; note = 5'-6-carboxyfluorescein-thymidine
  modified_base 18: mod_base = OTHER; note = 2'-O-methyladenosine
  modified_base 19: mod_base = OTHER; note = 2'-O-methyluridine
  modified_base 20: mod_base = OTHER; note = 2'-O-methylcytidine
  modified_base 21: mod_base = OTHER; note = cytidine ribonucleotide with a 3'-PO4 blocking group
  source 1..21: mol_type = other DNA
nttttttttttttttttnnnn

SEQ ID NO: 2159 - DNA, 21 bp, synthetic construct
  misc_feature 1..21: note = Modified oligo substrate or product
  modified_base 1: mod_base = OTHER; note = 5'-6-carboxyfluorescein-thymidine
  modified_base 18: mod_base = OTHER; note = 2'-O-methyladenosine
  modified_base 19: mod_base = OTHER; note = 2'-O-methyluridine
  modified_base 20: mod_base = OTHER; note = 2'-O-methylcytidine
  modified_base 21: mod_base = OTHER; note = 2'-deoxyadenosine with a 3'-PO4 blocking group
  source 1..21: mol_type = other DNA
nttttttttttttttttnnnn

SEQ ID NO: 2160 - DNA, 21 bp, synthetic construct
  misc_feature 1..21: note = Modified oligo substrate or product
  modified_base 1: mod_base = OTHER; note = 5'-6-carboxyfluorescein-thymidine
  modified_base 18: mod_base = OTHER; note = 2'-O-methyladenosine
  modified_base 19: mod_base = OTHER; note = 2'-O-methyluridine
  modified_base 20: mod_base = OTHER; note = 2'-O-methylcytidine
  modified_base 21: mod_base = OTHER; note = 2'-deoxyguanosine with a 3'-PO4 blocking group
  source 1..21: mol_type = other DNA
nttttttttttttttttnnnn

SEQ ID NO: 2161 - DNA, 21 bp, synthetic construct
  misc_feature 1..21: note = Modified oligo substrate or product
  modified_base 1: mod_base = OTHER; note = 5'-6-carboxyfluorescein-thymidine
  modified_base 18: mod_base = OTHER; note = 2'-O-methyladenosine
  modified_base 19: mod_base = OTHER; note = 2'-O-methyluridine
  modified_base 20: mod_base = OTHER; note = 2'-O-methylcytidine
  modified_base 21: mod_base = OTHER; note = 2'-deoxycytidine with a 3'-PO4 blocking group
  source 1..21: mol_type = other DNA
nttttttttttttttttnnnn

SEQ ID NO: 2162 - DNA, 21 bp, synthetic construct
  misc_feature 1..21: note = Modified oligo substrate or product
  modified_base 1: mod_base = OTHER; note = 5'-6-carboxyfluorescein-thymidine
  modified_base 18: mod_base = OTHER; note = 2'-O-methyladenosine
  modified_base 19: mod_base = OTHER; note = 2'-O-methyluridine
  modified_base 20: mod_base = OTHER; note = 2'-O-methylcytidine
  modified_base 21: mod_base = OTHER; note = 2'-deoxythymidine with a 3'-PO4 blocking group
  source 1..21: mol_type = other DNA
nttttttttttttttttnnnn

SEQ ID NO: 2163 - DNA, 969 bp, synthetic construct
  misc_feature 1..969: note = Variant of adenosine kinase
  source 1..969: mol_type = other DNA
atgcaccatcatcaccatcacgggggctccggcatgagtgcactgatttgcggttctttagcgtatgataccatcatggtgtttccggaccagttcaagaaccatattctgcccgatcgtgttcaccgcctcaatgtcagctttcttgtaccacgcatgcgtcgtgaatttggaggctgtgccggcaacattgcgtacaatctgcatctgttgggtggtgctccgatcgtaatggctacggtgggccaagatttcggtccgtatcgcgagcacttcgaaactctgggcattgacttatcccgcgtcaagatcatcgatgatctgagtacaccgcaggccttcattaccaccgacatggatcataaccagattacggcgtttcacggcggcgcaatgatgcgttcgtacgaaaatcacgttcgtgatgtgccgggtgttaccttgggcctcgtaggtcctgatggacgcgagggcatgatccaaaatgccgaagaatttgctgctggtggcattccgttcatttttgacccaggtcaggcagtgccgctgttcaacggccccgaactgcgcgagtttatcgaacaggcggactatgtggtggtcaacgattacgaaagcaatcttcttcaagcccgtactggctggaacgagcaggacattgtttcacgcgtgcaggcgtatatcaccacgcaaggttcggctggagccctggtacatacaccggagaagacctacgatattccgccggctaaaacccgtcgtgtcgttgatccaactggttgcggcgacgcgtttcgcgccggcctgatctatggtattcagcataattatgattggttgaccattggccgcatgggaaacttaatgggtgcgctgaaagtggaacaccctggcacccaaaatcagcgtttcgattttgccgaattcaacgaccagttcaaacaatattttggctacgcgctctaatga

SEQ ID NO: 2164 - protein, 321 aa, synthetic construct
  REGION 1..321: note = Variant of adenosine kinase
MHHHHHHGGSGMSALICGSLAYDTIMVFPDQFKNHILPDRVHRLNVSFLVPRMRREFGGCAGNIAYNLHLLGGAPIVMATVGQDFGPYREHFETLGIDLSRVKIIDDLSTPQAFITTDMDHNQITAFHGGAMMRSYENHVRDVPGVTLGLVGPDGREGMIQNAEEFAAGGIPFIFDPGQAVPLFNGPELREFIEQADYVVVNDYESNLLQARTGWNEQDIVSRVQAYITTQGSAGALVHTPEKTYDIPPAKTRRVVDPTGCGDAFRAGLIYGIQHNYDWLTIGRMGNLMGALKVEHPGTQNQRFDFAEFNDQFKQYFGYAL

SEQ ID NO: 2165 - DNA, 699 bp, synthetic construct
  misc_feature 1..699: note = Variant of adenylate kinase
  source 1..699: mol_type = other DNA
atgcaccatcatcaccatcacgggggctccggcatgggggcatatctggtgttcttaggtccgccgggcgcgggaaaaggtacccaaggccgtcgcatttcggcaaagactggcatcccgcatattagcacgggcgatatcctgcgtgacatcgtcgctaagcaaaacgatgaagttgcctcgaaaattaaagagatcatggagaaaggtgaactcgttccagatgaactgggtaatgcggtagtaaaacgccgcctgtcggagaaagactgcgaaaaaggctttattttggatggtttcccgcgtaccgtgcgccaagcggaatatctggatagttttcttgaaagccagaatcgccagttgacagccgccgtgctgttcaaagtccccgaagatgaagttgttcagcgtctgctgtctcgcctgatctgtccgaaatgcgggcgtatctacaacatgatttttctgccaccaaaagaagacgagctgtgtgacgattgcggtgtcggcttagtacagcgtgatgatgataaggaagaaacggtccgtcaccgcctgaaagtctaccttgagaagacccagccggtcattgactattatagtaagaaaggtattctcaaacgcgtagatgggtcgcaaggaatcgacaacgttgtggcagaagtcctggggattctgggttggagcgataagtaatga

SEQ ID NO: 2166 - protein, 231 aa, synthetic construct
  REGION 1..231: note = Variant of adenylate kinase
MHHHHHHGGSGMGAYLVFLGPPGAGKGTQGRRISAKTGIPHISTGDILRDIVAKQNDEVASKIKEIMEKGELVPDELGNAVVKRRLSEKDCEKGFILDGFPRTVRQAEYLDSFLESQNRQLTAAVLFKVPEDEVVQRLLSRLICPKCGRIYNMIFLPPKEDELCDDCGVGLVQRDDDKEETVRHRLKVYLEKTQPVIDYYSKKGILKRVDGSQGIDNVVAEVLGILGWSDK

1. An engineered 3′O-kinase comprising a polypeptide sequence having at least 85%, 90%, 91%, 92%, 93%, 94%, 95%, 96%, 97%, 98%, 99%, or more sequence identity to a reference sequence selected from SEQ ID NO: 10, 142, 372, 450, 496, 1042, 1180, 1412 1464, 1800, and 2078, or a functional fragment thereof, and one or more amino acid residue differences relative to the reference sequence.

2. The engineered 3′O-kinase of claim 1, wherein the polypeptide sequence comprises one or more amino acid residue differences as compared to the reference sequence of SEQ ID NO: 10 at amino acid positions selected from: 165, 89, 40, 13, 41, 74, 76, 93, 124, 150, 17, 32, 35, 36, 38, 39, 72, 60, 92, 116, 123, 138, 144, 148, 148, 156, 163, 177, 178, 179, and a combination thereof.

3. The engineered 3′O-kinase of claim 1, wherein the polypeptide sequence comprises one or more amino acid residue differences as compared to the reference sequence of SEQ ID NO: 10 at one or more amino acid positions selected from: 76/89/93/165, 13/76, 13/89, 13/124, 74/89, 76/93, 89/93, 89/124, 13/76/89/93, 13/76/89/93/124, 13/76/93, 13/76/93/124, 13/76/124, 13/89/124, 13/89/165, 74/89/93, 74/89/124, 76/89/93/124, 76/89/124/165, 76/89/165, 89/93/124, 13/36/38/39/40/74/89, 13/36/38/39/40/89, 13/36/38/39/72/76/89/93/124, 13/36/38/40, 13/36/38/40/72/74, 13/36/38/40/72/74/89/93, 13/36/38/40/72/74/93/156, 13/36/38/40/72/74/124, 13/36/38/40/72/76/89, 13/36/38/40/74/76, 13/36/38/40/76/89/93, 13/36/38/40/89, 13/36/39/40/72/76/89/124, 13/36/40/72/74/76/93, 13/36/40/72/156, 13/36/40/93/124, 13/38/39/40/72/76/93/165, 13/38/39/40/89/124/156, 13/38/40/89, 13/38/72/156, 13/40, 13/40/72/76/89, 13/72, 13/72/74/76/89/93, 13/72/74/76/89/93/124, 13/72/74/89/93, 13/72/74/89/93/124, 13/72/76, 13/72/76/89/93, 13/72/76/89/124, 13/72/76/124/156, 13/72/89, 13/72/89/93/124/156, 13/72/89/124, 13/72/89/124/165, 13/72/93/124, 13/72/124, 13/74/89/93, 13/74/89/93/124, 13/74/89/156, 13/76/89/93/156/165, 13/76/89/124/156, 13/76/89/156/165, 13/156, 36/38/39/40/72/74/76/124, 36/38/39/40/72/74/89, 36/38/39/40/74/76/89/93/124, 36/38/40/72/74/89/93/124/156, 36/39/40/72/76/89/93, 36/39/40/76/93/156, 36/40/72/74/89/93, 38/39, 38/39/40/72/74/76/89, 38/39/76, 38/40/72, 38/40/76/89/124, 38/40/89/124, 38/40/93, 38/40/156, 38/72/76/89, 38/72/89/93/124, 38/76/156, 39/40/72/76, 72/74/76/89/124, 72/74/76/124, 72/74/89, 72/74/89/93, 72/74/89/93/124, 72/74/93, 72/74/93/124, 72/76, 72/76/89/93, 72/76/124, 72/89/165, 72/93/124, 74/76/89, 74/76/89/93/124, 74/76/89/124, 74/89/93/156, 124/156, 138/139, and/or any combinations thereof.

4. The engineered 3′O-kinase of claim 1, wherein the polypeptide sequence comprises one or more amino residue difference as compared to the reference sequence of SEQ ID NO: 142 at one or more amino acid positions selected from: 13/76/93/198, 13/76/93, 13/76/198, 68, 68/103/181/182, 76, 82, 82/198, 83, 86, 88, 91, 93, 93/198, 103, 111, 169, 181, 182, 191,200, 210, and 211.

5. The engineered 3′O-kinase of claim 1, wherein the polypeptide sequence comprises one or more amino residue difference as compared to the reference sequence of SEQ ID NO: 372 at one or more amino acid positions selected from:
13/40/68/74/93/157, 13/40/68/157, and 40/68/81.

6. The engineered 3′O-kinase of claim 1, wherein the polypeptide sequence comprises one or more amino residue difference as compared to the reference sequence of SEQ ID NO: 450 at one or more amino acid positions selected from: 41/86/181/191, 41/46/190/191, 41/83/86/181/190/191, 41/181/191, 41/46/86/95/111, 41/46/86/95/191, 41/86/181/190/191, 41/86/181/191, 41/95/111/181/190/191, 41/190, 46/83/190/191, 46/86/181/190/191, 46/190/191, 48, 48/81, 48/81/103, 48/103/175/200, 48/103/200, 48/135, 48/135/175, 48/135/200, 48/200, 72, 72/82/88/124/166, 72/82/166, 72/82/91/124/166/182, 72/124/166, 72/166, 72/166/182, 72/182, 81, 81/103, 81/135, 81/135/200, 81/175/200, 81/200, 82, 82/88/91/124/166/182, 82/88/91/182, 82/88/124/166, 82/124/166, 82/124/166/182, 82/166/182, 86, 88/166, 91, 91/124/166/182/201, 91/166, 103, 103/135, 103/135/200, 103/175, 103/175/200, 103/200, 124, 124/166, 124/166/182, 135, 135/175/200, 135/200, 166, 166/182, 175, and 175/200.

7. The engineered 3′O-kinase of claim 1, wherein the polypeptide sequence comprises one or more amino residue difference as compared to the reference sequence of SEQ ID NO: 450 at one or more amino acid positions selected from: 2, 3, 4, 5, 6, 7, 13, 15, 17, 19, 22, 25, 26, 28, 29, 32, 35, 36, 44, 47, 49, 50, 51, 52, 53, 55, 56, 57, 58, 59, 60, 61, 63, 77, 78, 79, 84, 85, 92, 94, 97, 98, 100, 101, 104, 105, 109, 121, 122, 125, 126, 127, 129, 136, 139, 142, 149, 152, 153, 167, 170, 171, 173, 182, 191, 194, 195, 196, 197, 199, 200, 201, 202, 203, and 204.

8. The engineered 3′O-kinase of claim 1, wherein the polypeptide sequence comprises one or more amino residue difference as compared to the reference sequence of SEQ ID NO: 496 at one or more amino acid positions selected from: 3/49/105/124/125/200, 3/49/61/81/83/124/125/166/171, 3/49/61/81/124/125/200, 3/49/61/83, 3/49/61/83/125/166, 3/49/61/83/200, 3/49/61/124/125/171/200, 3/49/81/83/124/125/171, 3/49/81/83/124/125/200, 3/49/81/124/125/166/171, 3/49/124/125/166/171/200, 3/49/166/171, 3/61/81/105/124/125/166/171, 3/61/81/125/166/171/200, 3/81/105/124/166, 3/81/124/125/200, 3/83/166/171, 3/166/171, 49/61/81/83, 49/61/83/105/124/125/171, 49/61/83/124/125/171, 49/61/124/125/166/171, 49/61/125/171, 49/83/105/111/124, 49/83/105/124/125/166, 49/111/124/166/171/200, 49/124/125/166, 50/60/72/86/103, 50/60/82/83/103/126/142/175/191, 50/91/126/135, 60/182, 61/81/83/166/171/200, 61/81/125/166/171/200, 61/83/124/125/200, 61/124/125/166/171/200, 61/125, 61/166, 61/200, 72/82/83/142/181/191/200, 72/86/91/97/135, 72/142/182, 82/83, 82/83/103, 83/91/94/95/126/135/191, 83/105/124/125/166/200, 83/105/166, 83/125/171, 86/94/111/126/142, 86/126/135/142, 94/126, 105, 111/126/135/175/182, 124/125, 126, 142, 182, and 200.

9. The engineered 3′O-kinase of claim 1, wherein the polypeptide sequence comprises one or more amino residue difference as compared to the reference sequence of SEQ ID NO: 496 at one or more amino acid positions selected from: 3/49/61/83/200, 3/49/105/124/125/200, 72/82/83/142/181/191/200, 126, 142, and 191/200.

10. The engineered 3′O-kinase of claim 1, wherein the polypeptide sequence comprises one or more amino residue difference as compared to the reference sequence of SEQ ID NO: 1042 at one or more amino acid positions selected from: 53/100/105, 7, 7/28/32/97, 7/61, 7/61/85/97/126, 7/85/97/126, 13, 19, 19/53/105, 19/53/201, 19/100/105/201, 28/32/71/79/97/126/204, 28/32/85, 28/32/97/126, 28/36/61, 32/36/61/85/97/126/204, 32/36/126, 32/85/126/204, 35/50, 36/61/126/204, 50/78/142, 53/58/100/105/109, 53/58/109/201, 61, 79, 79/126/204, 85, 85/97, 85/126, 97, 100, 100/105, 105/201, 126, 171/201, and 204.

11. The engineered 3′O-kinase of claim 1, wherein the polypeptide sequence comprises one or more amino residue difference as compared to the reference sequence of SEQ ID NO: 1042 at one or more amino acid positions selected from: 10, 11, 20, 23, 27, 38, 39, 41, 62, 64, 67, 68, 69, 71, 71/131, 72, 74, 89, 93, 95, 96, 103, 110, 115, 117, 124, 130, 134, 135, 141, 146, 148, 150, 156, 157, 158, 160, 161, 163, 165, 166, 175, 176, 181, 182, and 192.

12. The engineered 3′O-kinase of claim 1, wherein the polypeptide sequence comprises one or more amino residue difference as compared to the reference sequence of SEQ ID NO: 1180 at one or more amino acid positions selected from: 127, 3/25/29/60/170, 3/25/29/126, 3/25/126, 3/44/126/170, 25/44/58, 25/58/60, 44/58/60/61/126/170, 58/61/126, 167/171/173, and 170.

13. The engineered 3′O-kinase of claim 1, wherein the polypeptide sequence comprises one or more amino residue difference as compared to the reference sequence of SEQ ID NO: 1180 at one or more amino acid positions selected from: 17/63, 17/63/104, 17/63/104/125, 22/55/98/127, 22/55/98/167/171/173/197, 25/29/60/126, 25/36/126, 28, 44/60/61/126, 59/104/125, 63/125, 79/125/129, 98/167/171, and 127.

14. The engineered 3′O-kinase of claim 1, wherein the polypeptide sequence comprises one or more amino residue difference as compared to the reference sequence of SEQ ID NO: 1412 at one or more amino acid positions selected from: 68/71/157/184, 27, 27/68, 27/68/71/184, 27/71, 27/71/184, 27/95, 41/72/160/161, 68/71/113, 68/71/113/157/176, 71, and 71/184.

15. The engineered 3′O-kinase of claim 1, wherein the polypeptide sequence comprises one or more amino residue difference as compared to the reference sequence of SEQ ID NO: 1412 at one or more amino acid positions selected from: 49, 52, 61, 83, and 125.

16. The engineered 3′O-kinase of claim 1, wherein the polypeptide sequence comprises one or more amino residue difference as compared to the reference sequence of SEQ ID NO: 1412 at one or more amino acid positions selected from: 2, 3, 4, 13, 28, 30, 32, 35, 36, 40, 43, 45, 48, 49, 51, 52, 53, 54, 56, 57, 60, 61, 63, 76, 77, 78, 80, 81, 82, 83, 85, 86, 90, 92, 94, 97, 100, 101, 104, 109, 121, 127, 129, 133, 139, 152, 153, 154, 167, 173, 186, 191, 194, 197, and 198.

17. The engineered 3′O-kinase of claim 1, wherein the polypeptide sequence comprises one or more amino residue difference as compared to the reference sequence of SEQ ID NO: 1412 at one or more amino acid positions selected from: 2, 19, 35, 45, 48, 49, 52, 53, 61, 76, 78, 80, 83, 85, 98, 106, 109, 121, 125, 170, 171, 194, and 195.

18. The engineered 3′O-kinase of claim 1, wherein the polypeptide sequence comprises one or more amino residue difference as compared to the reference sequence of SEQ ID NO: 1412 at one or more amino acid positions selected from: 28, 40, 48, 49, 51, 57, 60, 80, 82, 83, 92, 94, 98, 100, 104, 109, 127, 171, 186, 193, 194, 195, and 198.

19. The engineered 3′O-kinase of claim 1, wherein the polypeptide sequence comprises one or more amino residue difference as compared to the reference sequence of SEQ ID NO: 1464 at one or more amino acid positions selected from: 64/150/181, 3/20/74/103, 10/23/27/38/49/113, 10/27/38/49, 10/83, 23/27/49/83/125/141, 27/49/74, 27/60/83/125, 27/83/113, 39, 41/64/72/103/160, 41/64/103/117/150/160/161, 49/60, 49/64/96/113/175, 49/68/134, 60/61, 60/175, 61/110/146/151, 64, 64/72/115/150, 64/103/150/181, 64/161, 68/72/83/175, 72/103/124/160/161, 72/103/125/150/160/181, 72/124/150/160/181, 74/165, 103/182, 117/150, 150/160/181, 150/181, 151, 160/181, 182, and 192.

20. The engineered 3′O-kinase of claim 1, wherein the polypeptide sequence comprises one or more amino residue difference as compared to the reference sequence of SEQ ID NO: 1464 at one or more amino acid positions selected from: 20/103/192, 52/61, 61/110/165, 64/72/115/150, 72, 72/103/125/150/160/181, and 192.

21. The engineered 3′O-kinase of claim 1, wherein the polypeptide sequence comprises one or more amino residue difference as compared to the reference sequence of SEQ ID NO: 1464 at one or more amino acid positions selected from: 16, 20, 35, 68, 75, 85, 88, 89, 93, 122, 127, 134, 139, 146, 148, 150, 151, 161, 165, 182, and 182/205.

22. The engineered 3′O-kinase of claim 1, wherein the polypeptide sequence comprises one or more amino residue difference as compared to the reference sequence of SEQ ID NO: 1464 at one or more amino acid positions selected from: 7, 18, 20, 22, 35, 67, 68, 71, 75, 81, 85, 88, 89, 121, 136, 137, 139, 141, 142, 146, 148, 150, 151, 153, 160, 161, 176, 182, 182/205, and 185.

23. The engineered 3′O-kinase of claim 1, wherein the polypeptide sequence comprises one or more amino residue difference as compared to the reference sequence of SEQ ID NO: 1464 at one or more amino acid positions selected from: 18, 20, 23, 29, 30, 35, 36, 37, 38, 40, 71, 85, 89, 93, 95, 113, 127, 142, 146, 161, 165, and 185.

24. The engineered 3′O-kinase of claim 1, wherein the polypeptide sequence comprises one or more amino residue difference as compared to the reference sequence of SEQ ID NO: 1464 at one or more amino acid positions selected from: 8, 11, 15, 88, 113, 133, 143, 155, and 161.

25. The engineered 3′O-kinase of claim 1, wherein the polypeptide sequence comprises one or more amino residue difference as compared to the reference sequence of SEQ ID NO: 1800 at one or more amino acid positions selected from: 60/61, 27, 27/49/51, 27/49/171, 40, 40/92/104, 48, 48/53/60/76/80/193, 48/56/60/76/167/170/193, 49, 53/56/60/76, 56/60, 56/60/76/78/80, 56/60/85/193, 56/76/80/170, 56/76/80/193, 56/85/104, 56/167/193, 60, 60/193, 76/80, 98, 101, 101/109/198, 125, 165, 171/186, and 186.

26. The engineered 3′O-kinase of claim 1, wherein the polypeptide sequence comprises one or more amino residue difference as compared to the reference sequence of SEQ ID NO: 2078 at one or more amino acid positions selected from: 48, 52, 100, 165, and 193.

27. The engineered 3′O-kinase of claim 1, wherein 3′O-kinase comprises a polypeptide sequence having at least 85%, 90%, 91%, 92%, 93%, 94%, 95%, 96%, 97%, 98%, 99%, or more sequence identity to an even-numbered sequence selected from SEQ ID NOs: 56-366, or 372-2122.

28. The engineered 3′O-kinase of claim 1, wherein said engineered 3′O-kinase has activity in the conversion of a natural or modified NTP to a nucleoside triphosphate with an additional phosphate at the 3′ position of the sugar.

29. The engineered 3′O-kinase of claim 1, comprising at least one improved property, as compared to a wild-type or reference 3′O-kinase, wherein said improved Property comprises increased activity, increased activity on non-natural substrates, increased selectivity, increased substrate Promiscuity, decreased product inhibition and/or decreased byproduct formation, as compared to a wild-type or reference 3′O-kinase.

30. (canceled)

31. The engineered 3′O-kinase of claim 1, wherein said 3′O-kinase comprises increased selectivity toward the nucleoside tetraphosphate (NQP) over 4 pA or other byproduct species, as compared to a wild-type or reference 3′O-kinase.

32. The engineered 3′O-kinase of claim 1, wherein said 3′O-kinase comprises increased activity in the conversion of a natural or modified NTP to a nucleoside triphosphate with an additional phosphate at the 3′ position of the sugar, as compared to a wild-type or reference 3′O-kinase.

33. The engineered 3′O-kinase of claim 1, wherein said 3′O-kinase is purified.

34. A polynucleotide encoding at least one engineered 3′O-kinase of claim 1.

35-39. (canceled)

40. An expression vector comprising at least one polynucleotide claim 34.

41. A host cell comprising at least one expression vector of claim 40.

42. A method of producing an engineered 3′O-kinase polypeptide in a host cell comprising culturing a host cell of claim 41, under suitable culture conditions, such that at least one engineered 3′O-kinase is produced.

43. (canceled)

44. (canceled)

45. A composition comprising at least one engineered 3′O-kinase of claim 1.

46. A method of producing an NTP with a phosphate group at the 3′ position of the sugar (NQP), the method comprising (i) providing a 3′O-kinase enzyme, and (ii) contacting the 3′O-kinase enzyme with an NTP under suitable reaction conditions, such that an NQP is produced.

47. (canceled)

48. (canceled)

49. The method of claim 46, further comprising a modification of the NTP and/or NQP at the 2′ position of the sugar.

50-52. (canceled)

53. The method of claim 46, further comprising a modification of the NTP and/or NQP at the phosphate chain.

54. The method of claim 53, wherein the modification of the NTP and/or NQP at the phosphate chain comprises an α-phosphothioate linkage.

55. The method of claim 46, further comprising a phosphate donor.

56. The method of claim 55, wherein the phosphate donor comprises acetyl phosphate, polyphosphate, or an NTP.

57. The method of claim 55, further comprising a phosphate donor that is the same or is a different type of NTP than the substrate NTP.

58. The method of claim 46, further comprising a phosphate recycling system.

59. (canceled)

60. The method of claim 58, wherein the phosphate recycling system comprises a phosphate donor and a kinase, wherein the kinase comprises acetate kinase or polyphosphate kinase/transferase.

61. The method of claim 58, further comprising a pyruvate oxidase enzyme.

62. (canceled)

63. (canceled)

64. The method of any claim 46, wherein the 3′O-kinase comprises an engineered 3′O-kinase of claim 1.

65. (canceled)

66. The method of claim 64, wherein said engineered 3′O-kinase converts an NTP to an NQP with a conversion rate that is at least 1.5 fold, 2 fold, 5 fold, 10 fold or more increased, as compared to a wild type or reference 3′O-kinase.

67. The method of claim 64, wherein the engineered 3′O-kinase has increased activity, increased activity on non-natural substrates, increased selectivity, increased substrate promiscuity, decreased product inhibition and/or decreased byproduct formation, as compared to a wild-type or reference 3′O-kinase known to those of skill in the art.

68-111. (canceled)

112. The engineered 3′O-kinase of claim 1, wherein said engineered 3′O-kinase is immobilized.

113-115. (canceled)
